(19) United States
(12) Patent Application Publication
(10) Pub. No.: US 2025/0066451 A1
(43) Pub. Date: Feb. 27, 2025

(54) IL-IR-I BINDING POLYPEPTIDE

(71) Applicant: Swedish Orphan Biovitrum AB (publ), Stockholm (SE)

(72) Inventors: Joachim Feldwisch, Tyreso (SE); Malin Lindborg, Saltsjo-Boo (SE); Joakim Nilsson, Danderyd (SE); Erik Nordling, Danderyd (SE); Robert Svensson, Stockholm (SE)

(73) Assignee: Swedish Orphan Biovitrum AB (publ), Stockholm (SE)

(21) Appl. No.: 18/830,150

(22) Filed: Sep. 10, 2024

Related U.S. Application Data
(63) Continuation of application No. 16/498,186, filed on Sep. 26, 2019, now Pat. No. 12,116,397.

(30) Foreign Application Priority Data
Mar. 31, 2017 (EP) 17164226.7

(51) Int. Cl. C07K 14/715; A61K 38/00; C07K 14/79

(52) U.S. Cl. CPC C07K 14/7155; C07K 14/79; A61K 38/00; C07K 2318/20; C07K 2319/21; C07K 2319/31

(57) ABSTRACT

The present disclosure relates to a class of engineered polypeptides having a binding affinity for interleukin-1 receptor type-I (IL-1R-I) which comprise the binding motif (BM) EX₂X₃X₄X₅X₆X₇EIX₁₀X₁₁LPNLX₁₆RX₁₈QYX₂₁A FIX₂₅X₂₆LX₂₈D. The present disclosure also relates to the use of such an IL-1R-I binding polypeptide as a therapeutic, prognostic and/or diagnostic agent.

### CROSS REFERENCE TO RELATED APPLICATION(S)

[0001] This Application is a Continuation application of application Ser. No. 16/498,186, filed Sep. 26, 2019, which is a National Stage filing under 35 U.S.C. 371 of International Patent Application No. PCT/EP2018/058448, filed Apr. 3, 2018, which claims priority to European Application Number 17164226.7, filed Mar. 31, 2017. The entire contents of these applications are incorporated herein by reference in their entirety.

### REFERENCE TO AN ELECTRONIC SEQUENCE LISTING

[0002] The contents of the electronic sequence listing (S197770006US01-SEQ-JDH.xml; Size: 2,443,134 bytes; and Date of Creation: Sep. 5, 2024) is herein incorporated by reference in its entirety.

### FIELD OF THE INVENTION

[0003] The present disclosure relates to a class of engineered polypeptides having a binding affinity for interleukin-1 receptor type-I (in the following referred to as IL-1R-I). The present disclosure also relates to the use of such an IL-1R-I binding polypeptide as a therapeutic, prognostic and/or diagnostic agent.

### BACKGROUND

[0004] The central role of the IL-1 system in the initiation and maintenance of inflammatory response, as well as its role in innate and adaptive branches of the immune system, makes it an attractive target for pharmaceutical intervention (Dinarello, 2009, Annu Rev Immunol, 27:519-50; Sims and Smith, 2010, Nat Rev Immunol. 10 (2): 89-102). Since the IL-1 system in many cases plays the role of initiator and master cytokine in inflammatory response, many aspects of the progression of a pathological immune response can be modulated by such intervention. The biological activity of IL-1B can be pharmacologically inhibited by antibodies that prevent, or modulate its binding to the type IL-1 receptor IL-1R-I.

[0005] The biological activity of the IL-1 system can also be modulated by antagonizing the IL-1R. The recombinant form of endogenous IL-1Ra denoted anakinra (Kineret®) is described in e.g. U.S. Pat. No. 6,599,873, EP 0343684 and EP 0541920. Anakinra has shown clinical efficacy in rheumatoid arthritis, cryopyrin-associated periodic syndromes (CAPS; Koné-Paut and Galeotti, 2014, Expert Rev Clin Immunol, 10 (1): 7-18), as well as in a large number of other inflammatory and autoimmune conditions (Dinarello et al, 2011, Blood, 117 (14): 3720-32; Dinarello et al, 2012, Nat Rev Drug Discov, 11 (8): 633-52)).

[0006] The IL-1 receptor can also be antagonized by antibodies that bind to IL-1R-I subunit and prevent ligand-mediated IL-1 receptor activation and signaling. Several such antibodies are described in WO 2004/022718, which discloses IL-1R-I antagonists such as 15C4. Other examples of IL-1 receptor antagonizing antibodies binding to the IL-1R-I subunit are described in WO 2010/052505, which discloses IL-1R-I antagonists such as Antibody 9GL. Yet another example of an IL-1 receptor antagonizing antibody, denoted 2D8 is described in WO 2005/023872.

[0007] The unpredictable and chronic nature of inflammatory diseases, as well as a high unmet medical need, warrants the development of new modes of treatment. Since tissue penetration rate is negatively associated with the size of the molecule, relatively large antibody molecules inherently have poor tissue distribution and penetration capacity.

[0008] Thus, the use of antibodies, or other large molecule drugs, is not always optimal for therapy and there is continued need for provision of agents with a high affinity for the IL-1 receptor.

### SUMMARY OF THE INVENTION

[0009] It is an object of the present disclosure to provide new IL-1R-I binding agents, which could for example be used for therapeutic, prognostic and diagnostic applications.

[0010] It is an object of the present disclosure to provide a molecule allowing for efficient therapy targeting various forms of inflammatory, autoinflammatory and autoimmune diseases.

[0011] It is furthermore an object of the present disclosure to provide a molecule suitable for prognostic and diagnostic applications.

[0012] These and other objects, which are evident to the skilled person from the present disclosure, are met by different aspects of the invention as claimed in the appended claims and as generally disclosed herein.

[0013] Thus, in the first aspect of the disclosure, there is provided an IL-1R-I binding polypeptide, comprising an IL-1R-I binding motif BM, which motif consists of an amino acid sequence selected from:

i)
(SEQ ID NO: 1686)
EX₂X₃X₄X₅X₆X₇EIX₁₀X₁₁LPNLX₁₆RX₁₈QYX₂₁AFIX₂₅X₂₆LX₂₈D

wherein, independently from each other,
[0014] X₂ is selected from A, D, E, F, H, I, L, Q, S, T and V;
[0015] X₃ is selected from A, D, E, F, H, I, K, L, N, Q, R, S, T, V, W and Y;
[0016] X₄ is selected from A, D, E, F, H, I, K, L, M, N, Q, R, S, T, V, W and Y;
[0017] X₅ is selected from A, I and V;
[0018] X₆ is selected from F, H, I, Q, R, T, V and Y;
[0019] X₇ is selected from A, D, E, F, G, H, I, L, M, Q, S, T, V, W and Y;
[0020] X₁₀ is selected from F and Y;
[0021] X₁₁ is selected from A, D, E, F, G, H, I, K, L, M, N, Q, R, S, T, V, W and Y;
[0022] X₁₆ is selected from N and T;
[0023] X₁₈ is selected from K, R and S;
[0024] X₂₁ is selected from Q, T and V;
[0025] X₂₅ is selected from I, M, R, V and Y;
[0026] X₂₆ is selected from K and S, and
[0027] X₂₈ is selected from F, I, L and M,
[0028] and
   ii) an amino acid sequence which has at least 96% identity to the sequence defined in i) provided that X₅ is I or V.

[0029] The above definition of a class of sequence related, IL-1R-I binding polypeptides is based on a statistical analysis of a number of random polypeptide variants of a parent scaffold, that were selected for their interaction with IL-1R-I in several different selection experiments. The identified IL-1R-I binding motif, or “BM”, corresponds to the target binding region of the parent scaffold, which region constitutes two alpha helices within a three-helical bundle protein domain. In the parent scaffold, the varied amino acid residues of the two BM helices constitute a binding surface for interaction with the constant Fc part of antibodies. In the present disclosure, the random variation of binding surface residues and subsequent selection of variants have replaced the Fc interaction capacity with a capacity for interaction with IL-1R-I.

[0030] As the skilled person will realize, the function of any polypeptide, such as the IL-1R-I binding capacity of the polypeptide of the present disclosure, is dependent on the tertiary structure of the polypeptide. It is therefore possible to make minor changes to the sequence of amino acids in a polypeptide without affecting the function thereof. Thus, the disclosure encompasses modified variants of the IL-1R-I binding polypeptide, which have retained IL-1R-I binding characteristics.

[0031] In this way, also encompassed by the present disclosure is an IL-1R-I binding polypeptide comprising an amino acid sequence with 96% or greater identity to a polypeptide as defined in i). Thus, certain sequence variants of the sequence defined in i) are encompassed by the above definition under the proviso that within such sequence variants X₅ is I or V. For example, it is possible that an amino acid residue belonging to a certain functional grouping of amino acid residues (e.g. hydrophobic, hydrophilic, polar etc) could be exchanged for another amino acid residue from the same functional group.

[0032] In some embodiments, such changes may be made in any position of the sequence of the IL-1R-I binding polypeptide as disclosed herein. In other embodiments, such changes may be made only in the non-variable positions, also denoted scaffold amino acid residues. In such cases, changes are not allowed in the variable positions, i.e. positions denoted with an “X” in sequence i).

[0033] The term “% identity”, as used throughout the specification, may for example be calculated as follows. The query sequence is aligned to the target sequence using the CLUSTAL W algorithm (Thompson et al, 1994, Nucleic Acids Research, 22:4673-4680). A comparison is made over the window corresponding to the shortest of the aligned sequences. The shortest of the aligned sequences may in some instances be the target sequence. In other instances, the query sequence may constitute the shortest of the aligned sequences. The amino acid residues at each position are compared and the percentage of positions in the query sequence that have identical correspondences in the target sequence is reported as % identity.

[0034] As used herein “Xₙ” and “Xₘ” are used to indicate amino acids in positions n and m in the sequence i) as defined above, wherein n and m are integers which indicate the position of an amino acid within said sequence as counted from the N-terminal end of said sequence. For example, X₃ and X₇ indicate the amino acid in position three and seven, respectively, from the N-terminal end of sequence i).

[0035] In embodiments according to the first aspect, there are provided polypeptides wherein Xₙ in sequence i) is independently selected from a group of possible residues according to Table 1. The skilled person will appreciate that Xₙ may be selected from any one of the listed groups of possible residues and that this selection is independent from the selection of amino acids in Xₘ, wherein n≠m. Thus, any of the listed possible residues in position Xₙ in Table 1 may be independently combined with any of the listed possible residues in any other variable position in Table 1.

[0036] The skilled person will appreciate that Table 1 is to be read as follows: In one embodiment according to the first aspect, there is provided a polypeptide wherein amino acid residue “Xₙ” in sequence i) is selected from “Possible residues”. Thus, Table 1 discloses several specific and individualized embodiments of the first aspect of the present disclosure. For example, in one embodiment according to the first aspect, there is provided a polypeptide wherein X₄ in sequence i) is selected from A, D, E, I, K, Q, S and V, and in another embodiment according to the first aspect, there is provided a polypeptide wherein X₄ in sequence i) is selected from A, E, I, K, Q and V. For avoidance of doubt, the listed embodiments may be freely combined in yet other embodiments. For example, one such combined embodiment is a polypeptide in which X₄ is selected from A, E, I, K, Q and V, while X₆ is selected from H, Q, T and Y, and X₁₁ is selected from H, R and Y.

TABLE 1
Embodiments of the first aspect of the present disclosure

| Residue Xₙ | Possible residues |
|---|---|
| X₂ | A, E, F, H, I, L, Q, S, |
| | T, V |
| X₂ | A, F, H, I, L, Q, S, T, V |
| X₂ | A, H, I, L, Q, S, T, V |
| X₂ | A, H, I, L, Q, T, V |
| X₂ | A, H, I, L, T, V |
| X₂ | A, F, I, L, T, V |
| X₂ | A, I, L, T, V |
| X₂ | A, I, T, V |
| X₂ | A, I, L, T |
| X₂ | A, L, T, V |
| X₂ | A, I, L, V |
| X₂ | I, L, T, V |
| X₂ | A, I, T |
| X₂ | A, I, V |
| X₂ | A, T, V |
| X₂ | I, T, V |
| X₂ | I, L, T |
| X₂ | I, L, V |
| X₂ | L, T, V |
| X₂ | I, V |
| X₂ | I, L |
| X₂ | I, T |
| X₂ | I, V |
| X₂ | L, T |
| X₂ | L, V |
| X₂ | T, V |
| X₂ | A, I |
| X₂ | A, T |
| X₂ | A, V |
| X₂ | L |
| X₂ | T |
| X₂ | V |
| X₂ | I |
| X₂ | A |
| X₃ | A, D, E, F, H, I, K, L, |
| | Q, R, S, T, V, W, Y |
| X₃ | A, D, E, F, H, I, K, L, |
| | N, Q, R, S, T, V, Y |
| X₃ | A, D, E, H, I, K, L, N, |
| | Q, R, S, T, V, Y |
| X₃ | A, D, E, F, H, I, K, Q, |
| | R, S, T, V, Y |
| X₃ | A, D, E, F, H, I, K, Q, |
| | R, V, Y |
| X₃ | D, E, H, I, K, L, Q, T, |
| | V, Y |
| X₃ | D, E, H, I, K, Q, T, V, |
| | Y |
| X₃ | D, E, H, I, K, Q, R, S, |
| | V, Y |
| X₃ | D, E, H, I, K, Q, S, V, |
| | Y |
| X₃ | D, E, H, I, K, Q, R, V, |
| | Y |
| X₃ | D, E, I, K, Q, R, V, Y |
| X₃ | D, E, H, I, K, Q, V, Y |
| X₃ | D, E, H, I, Q, V, Y |
| X₃ | D, E, I, Q, R, V, Y |
| X₃ | D, E, I, Q, V, Y |
| X₃ | D, E, H, Q, Y |
| X₃ | D, E, Q, V, Y |
| X₃ | D, E, V, Y |
| X₃ | D, E, R, V |
| X₃ | D, E, K, V |
| X₃ | E, I, V, Y |
| X₃ | E, V, Y |
| X₃ | D, E, V |
| X₃ | D, E, Y |
| X₃ | E, V |
| X₃ | D, E |
| X₃ | E, Y |
| X₃ | E, I |
| X₃ | E, K |
| X₃ | E |
| X₄ | A, D, E, F, H, I, K, L, |
| | N, Q, R, S, T, V, W, Y |
| X₄ | A, D, E, F, H, I, K, L, |
| | N, Q, R, S, T, V, Y |
| X₄ | A, D, E, F, H, I, K, L, |
| | Q, R, S, T, V, W, Y |
| X₄ | A, D, E, F, H, I, K, Q, |
| | R, S, T, V, W, Y |
| X₄ | A, D, E, F, H, K, L, Q, |
| | R, S, T, V, W, Y |
| X₄ | A, D, E, H, I, K, L, Q, |
| | R, S, T, V, W, Y |
| X₄ | A, D, E, H, I, K, L, N, |
| | Q, R, S, T, V, Y |
| X₄ | A, D, E, I, K, Q, R, S, |
| | T, V |
| X₄ | A, D, E, I, K, Q, T, V |
| X₄ | A, D, E, H, I, K, N, Q, |
| | R, S, T, V, Y |
| X₄ | A, D, E, H, I, K, Q, R, |
| | S, T, V, W, Y |
| X₄ | A, D, E, I, K, Q, R, S, |
| | T, V |
| X₄ | A, E, I, K, Q, R, T, V, Y |
| X₄ | A, D, E, H, I, K, Q, R, |
| | S, T, V |
| X₄ | A, D, E, H, I, K, R, S, |
| | V |
| X₄ | A, D, E, H, K Q V, W |
| X₄ | A, D, E, H, I, R, S, T, V |
| X₄ | A, D, E, I, K, Q, S, V |
| X₄ | A, D, E, I, Q, R, V |
| X₄ | A, D, E, K, Q, S, T, V |
| X₄ | A, D, E, I, Q, V |
| X₄ | A, D, E, K, Q, V |
| X₄ | A, E, I, K, Q, V |
| X₄ | A, E, H, K, Q, V |
| X₄ | A, D, E, I, V |
| X₄ | A, D, E, I, R |
| X₄ | D, E R, T, V |
| X₄ | A, D, E, K, Q |
| X₄ | A, D, E, Q, V |
| X₄ | A, D, E, K, V |
| X₄ | A, E, Q, V |
| X₄ | A, E, I, R |
| X₄ | A, D, E, I |
| X₄ | A, D, E, Q |
| X₄ | A, D, E, V |
| X₄ | A, D, E, K |
| X₄ | A, E, K, V |
| X₄ | A, D, E |
| X₄ | A, E, V |
| X₄ | A, D |
| X₄ | A, E |
| X₄ | D, E |
| X₄ | E, V |
| X₄ | E |
| X₄ | D |
| X₄ | A |
| X₄ | V |
| X₅ | A, V |
| X₅ | I, V |
| X₅ | A, I |
| X₅ | A |
| X₅ | I |
| X₅ | V |
| X₆ | F, H, Q, R, V, Y |
| X₆ | H, Q, T, Y |
| X₆ | F, H, Q, Y |
| X₆ | A, H, Q, W, Y |
| X₆ | H, Q, Y |
| X₆ | Q, Y |
| X₆ | Y |
| X₆ | Q |
| X₇ | A, D, E, F, H, I, L, M, |
| | Q, S, V, W, Y |
| X₇ | A, D, E, F, H, L, M, Q, |
| | R, W, Y |
| X₇ | A, D, E, F, H, I, L, M, |
| | Q, W, Y |
| X₇ | D, E, F, H, L, M, Q, W, |
| | Y |
| X₇ | D, F, H, L, M, Q, W, Y |
| X₇ | F, H, I, L, M, Q, V, W, |
| | Y |
| X₇ | F, H, I, L, M, Q, V, Y |
| X₇ | D, F, H, L, M, Q, W, Y |
| X₇ | F, H, I, L, M, Q, Y |
| X₇ | F, L, M, Q, W, Y |
| X₇ | F, M, Q, W, Y |
| X₇ | F, L, M, W, Y |
| X₇ | F, I, L, M, Y |
| X₇ | F, H, M, W, Y |
| X₇ | F, L, M, Y |
| X₇ | F, M, W, Y |
| X₇ | F, L, M, W |
| X₇ | D, F, H, M |
| X₇ | D, F, M |
| X₇ | F, M, Y |
| X₇ | M, W, Y |
| X₇ | F, M, W |
| X₇ | F, L, M |
| X₇ | L, M, Y |
| X₇ | F, L, Y |
| X₇ | F, M |
| X₇ | L, M |
| X₇ | M, Y |
| X₇ | F, L |
| X₇ | L, Y |
| X₇ | F, Y |
| X₇ | F, W |
| X₇ | M, W |
| X₇ | L |
| X₇ | Y |
| X₇ | F |
| X₇ | M |
| X₇ | W |
| X₁₀ | F |
| X₁₀ | Y |
| X₁₁ | A, D, E, F, G, H, I, K, |
| | L, N, Q, R, S, T, V, Y |
| X₁₁ | A, D, E, F, G, H, K, L, |
| | N, Q, R, S, T, V, W, Y |
| X₁₁ | A, D, E, F, G, H, I, K, |
| | N, Q, R, S, T, V, Y |
| X₁₁ | A, D, E, F, G, H, K, L, |
| | N, Q, R, S, T, V, Y |
| X₁₁ | A, D, E, F, G, H, K, L, |
| | Q, R, S, T, V, W, Y |
| X₁₁ | A, D, E, F, G, H, K, L, |
| | N, Q, R, S, Y |
| X₁₁ | A, D, E, F, G, H, K, L, |
| | Q, R, S, T, V, Y |
| X₁₁ | A, D, E, F, G, H, K, L, |
| | Q, R, S, T Y |
| X₁₁ | A, D, E, F, G, H, K, L, |
| | N, Q, R, S, T, Y |
| X₁₁ | A, D, E, F, G, H, K, N, |
| | Q, R, S, T, V, Y |
| X₁₁ | A, D, E, F, G, H, K, N, |
| | Q, R, S, V, Y |
| X₁₁ | A, D, E, F, G, H, K, Q, |
| | R, S, V, W, Y |
| X₁₁ | A, D, E, F, G, H, K, Q, |
| | R, S, V, Y |
| X₁₁ | A, D, E, G, H, K, N, Q, |
| | R, S, Y |
| X₁₁ | A, D, E, F, G, H, I, L, |
| | M, Q, S, T, V, W, Y |
| X₁₁ | A, D, E, G, K, N, Q, R, |
| | S, T, Y |
| X₁₁ | A, D, E, F, G, H, Q, R, |
| | S, Y |
| X₁₁ | A, D, E, G, H, Q, S, Y |
| X₁₁ | A, D, E, F, G, H, K, Q, |
| | R, S, Y |
| X₁₁ | A, D, G, H, K, Q, R, S, |
| | Y |
| X₁₁ | A, E, G, H, K, N, Q, R, |
| | S, Y |
| X₁₁ | A, E, G, H, K, N, R, S, |
| | Y |
| X₁₁ | A, E, G, H, K, N, S, Y |
| X₁₁ | A, E, G, H, N, R, S, Y |
| X₁₁ | A, D, G, H, K, Q, R, S |
| X₁₁ | A, D, G, H, Q, R, S, Y |
| X₁₁ | A, E, G, H, R, S, Y |
| X₁₁ | A, D, G, H, Q, R, S |
| X₁₁ | A, G, H, Q, R, S, Y |
| X₁₁ | A, G, H, Q, R, S |
| X₁₁ | A, E, G, H, S, Y |
| X₁₁ | A, E, G, N, S, Y |
| X₁₁ | A, H, R, S, Y |
| X₁₁ | A, D, G, H, S, Y |
| X₁₁ | A, D, G, H, R, Y |
| X₁₁ | A, E, N, R, Y |
| X₁₁ | A, E, G, H, Y |
| X₁₁ | A, G, H, S, Y |
| X₁₁ | A, E, G, S, Y |
| X₁₁ | A, E, G, H, S |
| X₁₁ | A, E, H, R, Y |
| X₁₁ | A, G, H, R, Y |
| X₁₁ | A, H, R, S, Y |
| X₁₁ | A, E, G, N, S |
| X₁₁ | A, H, N, R, Y |
| X₁₁ | A, D, G, H |
| X₁₁ | A, G, S, Y |
| X₁₁ | A, G, H, Y |
| X₁₁ | A, G, H, S |
| X₁₁ | A, E, G, Y |
| X₁₁ | A, E, G, S |
| X₁₁ | A, E, G, H |
| X₁₁ | A, H, R, Y |
| X₁₁ | G, H, R, Y |
| X₁₁ | A, G, R, Y |
| X₁₁ | A, G, H, Y |
| X₁₁ | A, G, H, R |
| X₁₁ | A, E, G, N |
| X₁₁ | A, E, G, S |
| X₁₁ | A, E, G |
| X₁₁ | A, G, H |
| X₁₁ | A, G, S |
| X₁₁ | A, G, Y |
| X₁₁ | A, H, R |
| X₁₁ | A, R, Y |
| X₁₁ | A, H, Y |
| X₁₁ | H, R, Y |
| X₁₁ | A, G |
| X₁₁ | A, H |
| X₁₁ | A, R |
| X₁₁ | A, Y |
| X₁₁ | H, R |
| X₁₁ | H, Y |
| X₁₁ | R, Y |
| X₁₁ | A, E |
| X₁₁ | A, |
| X₁₁ | G |
| X₁₁ | R |
| X₁₁ | Y |
| X₁₁ | H |
| X₁₁ | E |
| X₁₆ | N |
| X₁₆ | T |
| X₁₈ | K, R |
| X₁₈ | R |
| X₁₈ | K |
| X₂₁ | T, V |
| X₂₁ | T |
| X₂₁ | V |
| X₂₅ | I, M, R |
| X₂₅ | I, R |
| X₂₅ | R |
| X₂₅ | I |
| X₂₆ | K |
| X₂₆ | S |
| X₂₈ | F, I, L |
| X₂₈ | F, L |
| X₂₈ | F |
| X₂₈ | L |

[0037] In one embodiment of the present disclosure there is provided an IL-1R-I binding polypeptide, wherein in i)
[0038] X₂ is selected from A, E, F, H, I, L, Q, S, T and V;
[0039] X₃ is selected from A, D, E, F, H, I, K, L, N, Q, R, S, T, V, W and Y;
[0040] X₄ is selected from A, D, E, F, H, I, K, L, M, N, Q, R, S, T, V, W and Y;
[0041] X₅ is selected from A, I and V;
[0042] X₆ is selected from F, H, Q, R, V and Y;
[0043] X₇ is selected from A, D, E, F, G, H, I, L, M, Q, S, T, V, W and Y;
[0044] X₁₀ is selected from F and Y;
[0045] X₁₁ is selected from A, D, E, F, G, H, I, L, M, Q, S, T, V, W and Y;
[0046] X₁₆ is selected from N and T;
[0047] X₁₈ is selected from K and R;
[0048] X₂₁ is selected from T and V;
[0049] X₂₅ is selected from I and R;
[0050] X₂₆ is selected from K and S, and
[0051] X₂₈ is selected from F and L.

[0052] In one embodiment of the present disclosure there is provided an IL-1R-I binding polypeptide, wherein in i)
[0053] X₂ is selected from A, E, F, H, I, L, Q, S, T and V;
[0054] X₃ is selected from A, D, E, F, H, I, K, L, Q, R, S, T, V, W and Y;
[0055] X₄ is selected from A, D, E, F, H, I, K, L, N, Q, R, S, T, V, W and Y;
[0056] X₅ is selected from A, I and V;
[0057] X₆ is selected from H, Q, R, and Y;
[0058] X₇ is selected from A, D, E, F, G, H, I, L, M, Q, S, V, W and Y;
[0059] X₁₀ is selected from F and Y;
[0060] X₁₁ is selected from A, D, E, F, G, H, I, K, L, N, Q, R, S, T, V, W and Y;
[0061] X₁₆ is selected from N and T;
[0062] X₁₈ is selected from K and R;
[0063] X₂₁ is selected from T and V;
[0064] X₂₅ is selected from I and R;
[0065] X₂₆ is selected from K and S, and
[0066] X₂₈ is selected from F and L.

[0067] In one embodiment of the present disclosure there is provided an IL-1R-I binding polypeptide, wherein in i)
[0068] X₂ is selected from A, I, L, T and V;
[0069] X₃ is selected from E, I, V and Y;
[0070] X₄ is selected from A, D, E, F, H, I, K, L, Q, R, S, T, V, W and Y;
[0071] X₅ is selected from A, I and V;
[0072] X₆ is selected from Q and Y;
[0073] X₇ is selected from F, H, I, L, M, Q, V, W and Y;
[0074] X₁₀ is selected from F and Y;
[0075] X₁₁ is selected from A, D, E, F, G, H, K, L, Q, R, S, T, V, W and Y;
[0076] X₁₆ is selected from N and T;
[0077] X₁₈ is selected from K and R;
[0078] X₂₁ is selected from T and V;
[0079] X₂₅ is selected from I and R;
[0080] X₂₆ is selected from K and S, and
[0081] X₂₈ is selected from F and L.

[0082] In another embodiment of the present disclosure there is provided an IL-1R-I binding polypeptide, wherein said IL-1R-I binding motif consists of an amino acid sequence selected from a sequence wherein in i)
[0083] X₂ is selected from A, I, L, T and V;
[0084] X₃ is selected from E and Y;
[0085] X₄ is selected from A, E, I, K, Q, R, T, V and Y;
[0086] X₅ is selected from I and V;
[0087] X₆ is selected from Q and Y;
[0088] X₇ is selected from F and M;
[0089] X₁₀ is selected from F and Y;
[0090] X₁₁ is selected from A, D, E, F, G, H, K, L, Q, R, S, T, V and Y;
[0091] X₁₆ is selected from N and T;
[0092] X₁₈ is selected from K and R;
[0093] X₂₁ is selected from T and V;
[0094] X₂₅ is selected from I and R;
[0095] X₂₆ is selected from K and S, and
[0096] X₂₈ is selected from F and L,
   and an amino acid sequence which has at least 93% identity to the sequence defined above.

[0097] In another embodiment of the present disclosure there is provided an IL-1R-I binding polypeptide, wherein in i)
[0098] X₂ is selected from A, I, L, T and V;
[0099] X₃ is selected from E and Y;
[0100] X₄ is selected from A, D, E, F, H, K, L, Q, R, S, T, V, W and Y;
[0101] X₅ is selected from A, I and V;
[0102] X₆ is selected from Q and Y;
[0103] X₇ is selected from F, H, I, L, M, Q, V, W and Y, such as F, H, I, L, Q,
[0104] V, W and Y;
[0105] X₁₀ is selected from F and Y;
[0106] X₁₁ is selected from A, D, E, F, G, H, K, Q, R, S, V, W and Y;
[0107] X₁₆ is selected from N and T;
[0108] X₁₈ is selected from K and R;
[0109] X₂₁ is T;
[0110] X₂₅ is selected from I and R;
[0111] X₂₆ is selected from K and S, and
[0112] X₂₈ is selected from F and L.

[0113] In a more specific embodiment defining a sub-class of IL-1R-I binding polypeptides, sequence i) fulfills at least five of the ten conditions I-X:
[0114] I. X₃ is E;
[0115] II. X₅ is selected from I and V;
[0116] III. X₆ is selected from Q and Y;
[0117] IV. X₇ is selected from F and M;
[0118] V. X₁₀ is selected from F and Y;
[0119] VI. X₁₈ is selected from K and R;
[0120] VII. X₂₁ is T;
[0121] VIII. X₂₅ is R;
[0122] IX. X₂₆ is selected from K and S; and
[0123] X. X₂₈ is selected from F and L.

[0124] In some examples of an IL-1R-I binding polypeptide according to the first aspect, sequence i) fulfils at least six of the ten conditions I-X. More specifically, sequence i) may fulfil at least seven of the ten conditions I-X, such as at least eight of the ten conditions I-X, such as at least nine of the ten conditions I-X, such as all of the ten conditions I-X.

[0125] In some embodiments of an IL-1R-I binding polypeptide according to the first aspect, there is provided an IL-1R-I binding polypeptide, wherein X₂X₃X₆ is VEQ or VEY. In some embodiments there is provided an IL-1R-I binding polypeptide, wherein X₂X₃X₆ is IEQ or VEQ. In some embodiments X₆X₁₀ is selected from the group consisting of QF, QY, YF and YY. In some embodiments X₆X₁₀ is QF. In some embodiments X₁₀X₁₈ is selected from the group consisting of FK, FR, YK and YR. In some embodiments X₁₀X₁₈ is FK or FR. In some embodiments X₁₈X₂₅X₂₈ is KRL or RRL. In some embodiments X₅X₇ is AM, IM or VM. In some embodiments X₅X₇ is IM or VM.

[0126] In one embodiment, X₅ is selected from I and V. As demonstrated in the appended Example 4, the unintentional alteration in position X₅ of the BM resulted in the finding of an IL-1R-I binding polypeptide (Z18557, SEQ ID NO: 1205) displaying high affinity for IL-1R-I (see Table 11). The exchange of alanine in this position to valine or isoleucine allows for generation of IL-1R-I binding polypeptides with high affinity for IL-1R-I.

[0127] As described in detail in the experimental section to follow, the selection of IL-1R-I binding polypeptide variants has led to the identification of a number of individual IL-1R-I binding motif (BM) sequences. These sequences constitute individual embodiments of sequence i) according to this aspect. The sequences of individual IL-1R-I binding motifs correspond to amino acid positions 8-36 of the amino acid sequences listed as SEQ ID NOS 1-1632 and 1679 presented in FIGS. 1A-1BK. Thus, in one embodiment, of the IL-1R-I binding polypeptide according to this aspect, sequence i) corresponds to the sequence from position 8 to position 36 in a sequence selected from the group consisting of SEQ ID NO:1-1632 and 1679, such as the group consisting SEQ ID NO:20-1632, and 1679. In one embodiment sequence i) corresponds to the sequence from position 8 to position 36 in a sequence selected from the group consisting of SEQ ID NO:1206-1632 and 1679, such as the group consisting of SEQ ID NO:1210-1632 and 1679.

[0128] In one embodiment sequence i) corresponds to the sequence from position 8 to position 36 in a sequence selected from the group consisting of SEQ ID NO:1205 and 1250-1632.

[0129] In one embodiment sequence i) corresponds to the sequence from position 8 to position 36 in a sequence selected from the group consisting of SEQ ID NO:1206-1252 and 1679.

[0130] In another embodiment sequence i) corresponds to the sequence from position 8 to position 36 in a sequence selected from the group consisting of SEQ ID NO:1253-1632. In another embodiment sequence i) corresponds to the sequence from position 8 to position 36 in a sequence selected from the group consisting of SEQ ID NO:1253-1441 or the group consisting of SEQ ID NO: 1442-1632.

[0131] In one embodiment, sequence i) corresponds to the sequence from position 8 to position 36 in a sequence selected from the group consisting of SEQ ID NO:158, 227, 268, 294, 325, 1176, 1205, 1251, 1252, 1270, 1284, 1285, 1298, 1307, 1308, 1311, 1324, 1328, 1330, 1331, 1334, 1339, 1340, 1343, 1353, 1361, 1362, 1364, 1367, 1368, 1375, 1393, 1415, 1420, 1421, 1422, 1423, 1435, 1471, 1472, 1571, 1594 and 1662, such as from the group consisting of SEQ ID NO:268, 1205, 1252, 1270, 1284, 1285, 1298, 1307, 1308, 1324, 1328, 1330, 1331, 1334, 1339, 1340, 1343, 1361, 1364, 1367, 1368, 1375, 1393, 1415, 1420, 1421, 1422, 1423 and 1571, such as from the group consisting of SEQ ID NO:1252, 1285, 1298, 1308, 1324, 1328, 1330, 1331, 1340, 1361, 1393, 1415, 1420 and 1421.

[0132] In one particular embodiment sequence i) corresponds to the sequence from position 8 to position 36 in a sequence selected from the group consisting of SEQ ID NO:1252, 1285, 1307, 1308, 1328, 1331, 1415, 1421, 1435, 1594 and 1679. In one embodiment sequence i) corresponds to the sequence from position 8 to position 36 in a sequence selected from the group consisting of SEQ ID NO:1252, 1328, 1435 and 1679, such as the group consisting of SEQ ID NO:1252, 1328 and 1679; the group consisting of SEQ ID NO:1252, 1435, 1679; the group consisting of SEQ ID NO:1252 and 1679; or the group consisting of SEQ ID NO:1328 and 1435. In one embodiment, sequence i) corresponds to the sequence from position 8 to position 36 in sequence selected from the group consisting of SEQ ID NO: 1252, 1328 and 1435.

[0133] FIGS. 1A-1BK thus exemplifies polypeptide variants whose IL-1R-I binding capacity has been verified experimentally (at least by virtue of being isolated in an affinity based assay), which variants have led to the identification of a number of individual IL-1R-I binding motif (BM) sequences which constitute individual embodiments of BM which exhibit 93%, where applicable, or 96% identity with sequence i).

[0134] In some embodiments of the present disclosure, the BM as defined above “forms part of” a three-helix bundle protein domain. This is understood to mean that the sequence of the BM is “inserted” into or “grafted” onto the sequence of the original three-helix bundle domain, such that the BM replaces a similar structural motif in the original domain. For example, without wishing to be bound by theory, the BM is thought to constitute two of the three helices of a three-helix bundle, and can therefore replace such a two-helix motif within any three-helix bundle. As the skilled person will realize, the replacement of two helices of the three-helix bundle domain by the two BM helices has to be performed so as not to affect the basic structure of the polypeptide. That is, the overall folding of the Ca backbone of the polypeptide according to this embodiment of the invention is substantially the same as that of the three-helix bundle protein domain of which it forms a part, e.g. having the same elements of secondary structure in the same order etc. Thus, a BM according to the present disclosure “forms part” of a three-helix bundle domain if the polypeptide according to this embodiment has the same fold as the original domain, implying that the basic structural properties are shared, those properties e.g. resulting in similar CD spectra. The skilled person is aware of other parameters that are relevant.

[0135] In particular embodiments, the IL-1R-I binding motif (BM) thus forms part of a three-helix bundle protein domain. For example, the BM may essentially constitute two alpha helices with an interconnecting loop, within said three-helix bundle protein domain. In particular embodiments, said three-helix bundle protein domain is selected from domains of bacterial receptor proteins. Non-limiting examples of such domains are the five different three-helical domains of Protein A from Staphylococcus aureus, such as domain B, and derivatives thereof. In some embodiments, the three-helical bundle protein domain is a variant of protein Z, which is derived from domain B of staphylococcal Protein A.

[0136] In some embodiments where the IL-1R-I binding polypeptide as disclosed herein forms part of a three-helix bundle protein domain, the IL-1R-I binding polypeptide may comprise a binding module (BMod), the amino acid sequence of which is selected from:

iii)
(SEQ ID NO: 1687)
K-[BM]-DPSQSXₐX_{b}LLX_{c}EAKKLX_{d}XₑX_{f}Q;

[0137] wherein
[0138] [BM] is an IL-1R-I binding motif as defined herein;
[0139] Xₐ is selected from A and S;
[0140] X_{b} is selected from N and E;
[0141] X_{c} is selected from A, S and C;
[0142] X_{d} is selected from E, N and S;
[0143] Xₑ is selected from D, E and S;
[0144] X_{f} is selected from A and S; and
   [0145] iv) an amino acid sequence which has at least 91% identity to a sequence defined by iii).

[0146] In some embodiments, said polypeptides may beneficially exhibit high structural stability, such as resistance to chemical modifications, to changes in physical conditions and to proteolysis, during production and storage, as well as in vivo.

[0147] As discussed above, polypeptides comprising minor changes as compared to the above amino acid sequences, which do not largely affect the tertiary structure and the function of the polypeptides, are also within the scope of the present disclosure. Thus, in some embodiments, sequence iv) has at least at least 93%, such as at least 95%, such as at least 97% identity to a sequence defined by iii). In particular embodiments, such minor changes as exemplified above may be present only in the flanking sequence, i.e. the parts of the sequence flanking the BM in iii) above. In other embodiments, minor changes can be present in the BM and/or in the flanking sequences.

[0148] In one embodiment, Xₐ in sequence iii) is A.

[0149] In one embodiment, Xₐ in sequence iii) is S.

[0150] In one embodiment, X_{b} in sequence iii) is N.

[0151] In one embodiment, X_{b} in sequence iii) is E.

[0152] In one embodiment, X_{c} in sequence iii) is A.

[0153] In one embodiment, X_{c} in sequence iii) is S.

[0154] In one embodiment, X_{c} in sequence iii) is C.

[0155] In one embodiment, X_{d} in sequence iii) is E.

[0156] In one embodiment, X_{d} in sequence iii) is N.

[0157] In one embodiment, X_{d} in sequence iii) is S.

[0158] In one embodiment, Xₑ in sequence iii) is D.

[0159] In one embodiment, Xₑ in sequence iii) is E.

[0160] In one embodiment, Xₑ in sequence iii) is S.

[0161] In one embodiment, X_{d}Xₑ in sequence iii) is selected from EE, ES, SE and SS.

[0162] In one embodiment, X_{d}Xₑ in sequence iii) is ES.

[0163] In one embodiment, X_{d}Xₑ in sequence iii) is SE.

[0164] In one embodiment, X_{f} in sequence iii) is A.

[0165] In one embodiment, X_{f} in sequence iii) is S.

[0166] In one embodiment, in sequence iii), Xₐ is A; X_{b} is N; X_{c} is A and X_{f} is A.

[0167] In one embodiment, in sequence iii), Xₐ is A; X_{b} is N; X_{c} is C and X_{f} is A.

[0168] In one embodiment, in sequence iii), Xₐ is S; X_{b} is E; X_{c} is S and X_{f} is S.

[0169] In one embodiment, in sequence iii), Xₐ is S; X_{b} is E; X_{c} is C and X_{f} is S.

[0170] In one embodiment, in sequence iii), Xₐ is A; X_{b} is N; X_{c} is A; X_{d}Xₑ is ND and X_{f} is A.

[0171] In one embodiment, in sequence iii), Xₐ is A; X_{b} is N; X_{c} is C; X_{d}Xₑ is ND and X_{f} is A.

[0172] In one embodiment, in sequence iii), Xₐ is S; X_{b} is E; X_{c} is S; X_{d}Xₑ is ND and X_{f} is S.

[0173] In one embodiment, in sequence iii), Xₐ is S; X_{b} is E; X_{c} is C; X_{d}Xₑ is ND and X_{f} is S.

[0174] In one embodiment, in sequence iii), Xₐ is A; X_{b} is N; X_{c} is A; X_{d}Xₑ is SE and X_{f} is A.

[0175] In one embodiment, in sequence iii), Xₐ is A; X_{b} is N; X_{c} is C; X_{d}Xₑ is SE and X_{f} is A.

[0176] In one embodiment, in sequence iii), Xₐ is S; X_{b} is E; X_{c} is S; X_{d}Xₑ is SE and X_{f} is S.

[0177] In one embodiment, in sequence iii), Xₐ is S; X_{b} is E; X_{c} is C; X_{d}Xₑ is SE and X_{f} is S.

[0178] In one embodiment, in sequence iii), Xₐ is A; X_{b} is N; X_{c} is A; X_{d}Xₑ is ES and X_{f} is A.

[0179] In one embodiment, in sequence iii), Xₐ is A; X_{b} is N; X_{c} is C; X_{d}Xₑ is ES and X_{f} is A.

[0180] In one embodiment, in sequence iii), Xₐ is S; X_{b} is E; X_{c} is S; X_{d}Xₑ is ES and X_{f} is S.

[0181] In one embodiment, in sequence iii), Xₐ is S; X_{b} is E; X_{c} is C; X_{d}Xₑ is ES and X_{f} is S.

[0182] In one embodiment, sequence iii) or iv) corresponds to the sequence from position 7 to position 55 in a sequence selected from the group consisting of SEQ ID NO:1-1638 and 1667-1670.

[0183] In yet a further embodiment, sequence iii) corresponds to the sequence from position 7 to position 55 in a sequence selected from the group consisting of SEQ ID NO:1-1638, 1667-1668 and 1670-1679; such as the group consisting of SEQ ID NO:20-1638 and 1670-1679. In one embodiment sequence iii) corresponds to the sequence from position 7 to position 55 in a sequence selected from the group consisting of SEQ ID NO: 1206-1638 and 1670-1679, such as the group consisting of SEQ ID NO: 1206-1632 and 1670-1679, such as the group consisting of SEQ ID NO: 1210-1638 and 1670-1679, such as the group consisting of SEQ ID NO: 1210-1632 and 1670-1679.

[0184] In one embodiment sequence iii) corresponds to the sequence from position 7 to position 55 in a sequence selected from the group consisting of SEQ ID NO:1205, 1250-1632 and 1670-1679.

[0185] In one embodiment sequence iii) corresponds to the sequence from position 7 to position 55 in a sequence selected from the group consisting of SEQ ID NO:1206-1252, 1672 and 1679.

[0186] In another embodiment sequence iii) corresponds to the sequence from position 7 to position 55 in a sequence selected from the group consisting of SEQ ID NO:1253-1632, 1670-1671 and 1673-1678. In another embodiment sequence iii) corresponds to the sequence from position 7 to position 55 in a sequence selected from the group consisting of SEQ ID NO: 1253-1441, 1670-1671 and 1674-1678 or the group consisting of SEQ ID NO: 1442-1632 and 1673.

[0187] In one embodiment, sequence iii) corresponds to the sequence from position 7 to position 55 in a sequence selected from the group consisting of SEQ ID NO:158, 227, 268, 294, 325, 1176, 1205, 1251, 1252, 1270, 1284, 1285, 1298, 1307, 1308, 1311, 1324, 1328, 1330, 1331, 1334, 1339, 1340, 1343, 1353, 1361, 1362, 1364, 1367, 1368, 1375, 1393, 1415, 1420, 1421, 1422, 1423, 1435, 1471, 1472, 1571, 1594, 1662 and 1670-1679, such as from the group consisting of SEQ ID NO:268, 1205, 1252, 1270, 1284, 1285, 1298, 1307, 1308, 1324, 1328, 1330, 1331, 1334, 1339, 1340, 1343, 1361, 1364, 1367, 1368, 1375, 1393, 1415, 1420, 1421, 1422, 1423, 1571, 1670-1672, 1674, and 1676-1679, such as from the group consisting of SEQ ID NO: 1252, 1285, 1298, 1308, 1324, 1328, 1330, 1331, 1340, 1361, 1393, 1415, 1420, 1421, 1670-1672, 1674, 1676-1677 and 1679.

[0188] In one particular embodiment sequence iii) corresponds to the sequence from position 7 to position 55 in a sequence selected from the group consisting of SEQ ID NO:1252, 1285, 1307, 1308, 1328, 1331, 1415, 1421, 1435, 1594 and 1670-1679. In one embodiment sequence iii) corresponds to the sequence from position 7 to position 55 in a sequence selected from the group consisting of SEQ ID NO:1252, 1328, 1435, 1672, 1675-1676 and 1679 such as the group consisting of SEQ ID NO:1252, 1328 and 1679; the group consisting of SEQ ID NO:1252, 1435 and 1679; or the group consisting of SEQ ID NO:1328 and 1435. In one embodiment, sequence i) corresponds to the sequence from position 7 to position 55 in sequence selected from the group consisting of SEQ ID NO:1252, 1328 and 1435.

[0189] In one embodiment, sequence iii) corresponds to the sequence from position 7 to position 55 in a sequence selected from the group consisting of SEQ ID NO:1672, 1675-1676 and 1679, such as the group consisting of SEQ ID NO: 1672 and 1675-1676.

[0190] Also, in a further embodiment, there is provided an IL-1R-I binding polypeptide, which comprises an amino acid sequence selected from:

v)
(SEQ ID NO: 1688)
YA-[BMod]-AP;

wherein [BMod] is an IL-1R-I binding module as defined herein; and
[0191] vi) an amino acid sequence which has at least 90% identity to a sequence defined in v).

[0192] Alternatively, there is provided an IL-1R-I binding polypeptide, which comprises an amino acid sequence selected from:

vii)
(SEQ ID NO: 1689)
FN-[BMod]-AP;

wherein [BMod] is an IL-1R-I binding module as defined herein; and
[0193] viii) an amino acid sequence which has at least 90% identity to a sequence defined in vii).

[0194] In one embodiment there is provided an IL-1R-I binding polypeptide, which comprises an amino acid selected from the group consisting of

ix)
(SEQ ID NO: 1690)
FNK-[BM]-DPSQS ANLLX_{c} EAKKL NDAQA P;

wherein [BM] is an IL-1R-I binding motif as defined above and X_{c} is selected from A and C; and
[0195] x) an amino acid sequence which has at least 90% identity to a sequence defined in ix).

[0196] In another embodiment, there is provided an IL-1R-I binding polypeptide, which comprises an amino acid selected from the group consisting of

xi)
(SEQ ID NO: 1691)
FAK-[BM]-DPSQS SELLX_{c} EAKKL SESQA P;

wherein [BM] is an IL-1R-I binding motif as defined above and X_{c} is selected from A, S and C; and
[0197] xii) an amino acid sequence which has at least 90% identity to a sequence defined in xi).

[0198] In another embodiment, there is provided an IL-1R-I binding polypeptide, which comprises an amino acid selected from the group consisting of

xiii)
(SEQ ID NO: 1692)
FAK-[BM]-DPSQS SELLX_{c} EAKKL NDSQA P;

wherein [BM] is an IL-1R-I binding motif as defined above and X_{c} is selected from A, S and C;
[0199] xiv) an amino acid sequence which has at least 90% identity to a sequence defined in xiii).

[0200] In yet another embodiment, there is provided an IL-1R-I binding polypeptide, which comprises an amino acid selected from the group consisting of

xv)
(SEQ ID NO: 1693)
YAK-[BM]-DPSQS SELLX_{c} EAKKL X_{d}XₑSQA P;

wherein [BM] is an IL-1R-I binding motif as defined above and X_{c} is selected from A, S and C, Xₐ is selected from E, N and S, and Xₑ is selected from D, E and S;
[0201] xvi) and an amino acid sequence which has at least 90% identity to a sequence defined in xv).

[0202] In yet another embodiment, there is provided an IL-1R-I binding polypeptide, which comprises an amino acid selected from the group consisting of

xvii)
(SEQ ID NO: 1694)
KYAK-[BM]-DPSQS SELLX_{c} EAKKL X_{d}XₑSQA P;

wherein [BM] is an IL-1R-I binding motif as defined above and X_{c} is selected from A, S and C, Xₐ is selected from E, N and S, and Xₑ is selected from D, E and S;
[0203] xviii) and an amino acid sequence which has at least 90% identity to a sequence defined in xvii).

[0204] As discussed above, polypeptides comprising minor changes as compared to the above amino acid sequences, which do not largely affect the tertiary structure and the function of the polypeptide, also fall within the scope of the present disclosure. Thus, in some embodiments, sequence vi), viii), x), xii), xiv), xvi) or xviii) may for example be at least 90%, such as at least 92%, such as at least 94%, such as at least 96%, such as at least 98% identical to a sequence defined by v), vii), ix), xi), xiii), xv) and xvii), respectively. In particular embodiments, such minor changes as exemplified above can be present only in flanking sequences, i.e. the parts of the sequences flanking the BM in v), vii), ix), xi), xiii), xv) and xviii). In other embodiments, minor changes can be present in the BM and/or in the flanking sequences.

[0205] In some embodiments, the IL-1R-I binding motif may form part of a polypeptide comprising an amino acid sequence selected from:

SEQ ID NO: 1695
ADNNFNK-[BM]DPSQSANLLSEAKKLNESQAPK;
SEQ ID NO: 1696
ADNKFNK-[BM]DPSQSANLLAEAKKLNDAQAPK;
SEQ ID NO: 1697
ADNKFNK-[BM]DPSVSKEILAEAKKLNDAQAPK;
SEQ ID NO: 1698
ADAQQNNFNK-[BM]DPSQSTNVLGEAKKLNESQAPK;
SEQ ID NO: 1699
AQHDE-[BM]DPSQSANVLGEAQKLNDSQAPK;
SEQ ID NO: 1700
VDNKFNK-[BM]DPSQSANLLAEAKKLNDAQAPK;
SEQ ID NO: 1701
AEAKYAK-[BM]DPSESSELLSEAKKLNKSQAPK;
SEQ ID NO: 1702
VDAKYAK-[BM]DPSQSSELLAEAKKLNDAQAPK;
SEQ ID NO: 1703
VDAKYAK-[BM]DPSQSSELLAEAKKLNDSQAPK;
SEQ ID NO: 1704
AEAKYAK-[BM]DPSQSSELLSEAKKLNDSQAPK;
SEQ ID NO: 1705
AEAKYAK-[BM]DPSQSSELLSEAKKLNDSQAP;
SEQ ID NO: 1706
AEAKFAK-[BM]DPSQSSELLSEAKKLNDSQAPK;
SEQ ID NO: 1707
AEAKFAK-[BM]DPSQSSELLSEAKKLNDSQAP;
SEQ ID NO: 1708
AEAKYAK-[BM]DPSQSSELLAEAKKLNDAQAPK;
SEQ ID NO: 1709
AEAKYAK-[BM]DPSQSSELLSEAKKLSESQAPK;
SEQ ID NO: 1710
AEAKYAK-[BM]DPSQSSELLSEAKKLSESQAP;
SEQ ID NO: 1711
AEAKFAK-[BM]DPSQSSELLSEAKKLSESQAPK;
SEQ ID NO: 1712
AEAKFAK-[BM]DPSQSSELLSEAKKLSESQAP;
SEQ ID NO: 1713
AEAKYAK-[BM]DPSQSSELLAEAKKLSEAQAPK;
SEQ ID NO: 1714
AEAKYAK-[BM]DPSQSSELLSEAKKLESSQAPK;
SEQ ID NO: 1715
AEAKYAK-[BM]DPSQSSELLSEAKKLESSQAP;
SEQ ID NO: 1716
AEAKYAK-[BM]DPSQSSELLAEAKKLESAQAPK;
SEQ ID NO: 1717
AEAKYAK-[BM]DPSQSSELLSEAKKLSDSQAPK;
SEQ ID NO: 1718
AEAKYAK-[BM]DPSQSSELLSEAKKLSDSQAP;
SEQ ID NO: 1719
AEAKYAK-[BM]DPSQSSELLAEAKKLSDSQAPK;
SEQ ID NO: 1720
AEAKYAK-[BM]DPSQSSELLAEAKKLSDAQAPK;
SEQ ID NO: 1721
VDAKYAK-[BM]DPSQSSELLSEAKKLNDSQAPK;
SEQ ID NO: 1722
VDAKYAK-[BM]DPSQSSELLAEAKKLNDAQAPK;
SEQ ID NO: 1723
VDAKYAK-[BM]DPSQSSELLSEAKKLSESQAPK;
SEQ ID NO: 1724
VDAKYAK-[BM]DPSQSSELLAEAKKLSEAQAPK;
SEQ ID NO: 1725
VDAKYAK-[BM]DPSQSSELLSEAKKLESSQAPK;
SEQ ID NO: 1726
VDAKYAK-[BM]DPSQSSELLAEAKKLESAQAPK;
SEQ ID NO: 1727
VDAKYAK-[BM]DPSQSSELLSEAKKLSDSQAPK;
SEQ ID NO: 1728
VDAKYAK-[BM]DPSQSSELLAEAKKLSDSQAPK;
SEQ ID NO: 1729
VDAKYAK-[BM]DPSQSSELLAEAKKLSDAQAPK;
SEQ ID NO: 1730
VDAKYAK-[BM]DPSQSSELLAEAKKLNKAQAPK;
SEQ ID NO: 1731
AEAKYAK-[BM]DPSQSSELLAEAKKLNKAQAPK,
and
SEQ ID NO: 1732
ADAKYAK-[BM]DPSQSSELLSEAKKLNDSQAPK,

wherein [BM] is an IL-1R-I binding motif as defined herein.

[0206] In one embodiment, said IL-1R-I binding polypeptide comprises an amino acid sequence which has at least 89% identity to any one of the sequences defined above.

[0207] In one embodiment, the IL-1R-I binding polypeptide comprises an amino acid sequence selected from:

xix)
(SEQ ID NO: 1721)
VDAKYAK-[BM]-DPSQSSELLSEAKKLNDSQAPK

wherein [BM] is an IL-1R-I binding motif as defined herein; and
[0208] xx) an amino acid sequence which has at least 89% identity to the sequence defined in xix).

[0209] In one embodiment, the IL-1R-I binding polypeptide comprises an amino acid sequence selected from:

xxi)
(SEQ ID NO: 1709)
AEAKYAK-[BM]-DPSQSSELLSEAKKLSESQAPK

wherein [BM] is an IL-1R-I binding motif as defined herein; and
[0210] xxii) an amino acid sequence which has at least 89% identity to the sequence defined in xxi).

[0211] In one particular embodiment, said IL-1R-I binding polypeptide comprises an amino acid sequence selected from the group consisting of SEQ ID NO:1667-1668 and 1670-1679.

[0212] In one embodiment, the IL-1R-I binding polypeptide comprises an amino acid sequence selected from:

xxiii)
(SEQ ID NO: 1711)
AEAKFAK-[BM]-DPSQSSELLSEAKKLSESQAPK

wherein [BM] is an IL-1R-I binding motif as defined herein; and
[0213] xxiv) an amino acid sequence which has at least 89% identity to the sequence defined in xxiii).

[0214] Again, polypeptides comprising minor changes as compared to the above amino acid sequences, which do not largely affect the tertiary structure and the function of the polypeptide, also fall within the scope of the present disclosure. Thus, in some embodiments, sequence xx), xxii) or xxiv) may for example be at least 89%, such as at least 91%, such as at least 93%, such as at least 94%, such as at least 96%, such as at least 98% identical to a sequence defined by xix), xxi) or xxiii) respectively. Once again, in particular embodiments such minor changes as exemplified above can be present only in the sequences flanking the BM as set out in xix), xxi) or xxiii). In other embodiments, minor changes can be present in the BM and/or in the flanking sequences.

[0215] Sequence xix)-xxiv) in such IL-1R-I binding polypeptide may be selected from the sequence from position 1 to position 58 in a sequence selected from the group consisting of SEQ ID NO:1-1638, 1667-1668 and 1670-1679 as presented in FIGS. 1A-1BK.

[0216] In one embodiment of the IL-1R-I binding polypeptide according to this aspect, sequence xix), xxi) or xxiii) corresponds to the sequence from position 1 to position 58 in a sequence selected from the group consisting of SEQ ID NO: 1-1632, 1667-1668 and 1670-1679; such as the group consisting of SEQ ID NO: 20-1638, 1667-1668 and 1670-1679. In one embodiment sequence xix), xxi) or xxiii) corresponds to the sequence from position 1 to position 58 in a sequence selected from the group consisting of SEQ ID NO:1206-1632, 1667-1668 and 1670-1679, such as the group consisting of SEQ ID NO:1210-1632, 1667-1668 and 1670-1679.

[0217] In one embodiment sequence xvii), xix) or xxi) corresponds to the sequence from position 1 to position 58 in a sequence selected from the group consisting of SEQ ID NO:1205, 1250-1632 and 1670-1679.

[0218] In one embodiment sequence xix), xxi) or xxiii) corresponds to the sequence from position 1 to position 58 in a sequence selected from the group consisting of SEQ ID NO:1206-1252, 1672 and 1679.

[0219] In another embodiment sequence xix), xxi) or xxiii) corresponds to the sequence from position 1 to position 58 in a sequence selected from the group consisting of SEQ ID NO:1253-1632, 1670-1671 and 1673-1678. In another embodiment sequence xix), xxi) or xxiii) corresponds to the sequence from position 1 to position 58 in a sequence selected from the group consisting of SEQ ID NO:1253-1441, 1670-1671 and 1674-1678 or the group consisting of 1442-1632 and 1673.

[0220] In one embodiment sequence xix), xxi) or xxiii) corresponds to the sequence from position 1 to position 58 in a sequence selected from the group consisting of SEQ ID NO:158, 227, 268, 294, 325, 1176, 1205, 1251, 1252, 1270, 1284, 1285, 1298, 1307, 1308, 1311, 1324, 1328, 1330, 1331, 1334, 1339, 1340, 1343, 1353, 1361, 1362, 1364, 1367, 1368, 1375, 1393, 1415, 1420, 1421, 1422, 1423, 1435, 1471, 1472, 1571, 1594, 1662 and 1670-1679, such as from the group consisting of SEQ ID NO:268, 1205, 1252, 1270, 1284, 1285, 1298, 1307, 1308, 1324, 1328, 1330, 1331, 1334, 1339, 1340, 1343, 1361, 1364, 1367, 1368, 1375, 1393, 1415, 1420, 1421, 1422, 1423, 1571, 1670-1672, 1674 and 1676-1679, such as from the group consisting of SEQ ID NO:1252, 1285, 1298, 1308, 1324, 1328, 1330, 1331, 1340, 1361, 1393, 1415, 1420, 1421, 1670-1672, 1674, 1676-1677 and 1679.

[0221] In one particular embodiment sequence xix), xxi) or xxiii) corresponds to the sequence from position 1 to position 58 in a sequence selected from the group consisting of SEQ ID NO:1252, 1285, 1307, 1308, 1328, 1331, 1415, 1421, 1435, 1594 and 1670-1679. In one embodiment sequence xix), xxi) or xxiii) corresponds to the sequence from position 1 to position 58 in a sequence selected from the group consisting of SEQ ID NO:1252, 1328, 1435 1672, 1675-1676 and 1679, such as the group consisting of SEQ ID NO: 1252, 1328 and 1679; the group consisting of SEQ ID NO:1252, 1435 and 1679; or the group consisting of SEQ ID NO:1328 and 1435. In one embodiment, sequence xix), xxi) or xxiii) corresponds to the sequence from position 1 to position 58 in a sequence selected from the group consisting of SEQ ID NO:1252, 1328 and 1435.

[0222] In one embodiment, sequence xix), xxi) or xxiii) corresponds to the sequence from position 1 to position 58 in a sequence selected from the group consisting of SEQ ID NO:1672, 1675-1676 and 1679, such as from the group consisting of SEQ ID NO:1672, 1675 and 1676.

[0223] In one embodiment, said IL-1R-I binding polypeptide has a melting temperature of above 45° C.

[0224] Binding of a polypeptide as defined herein to IL-1R-I may interfere with signaling via IL-1R-I either in vivo or in vitro. Thus, in one embodiment, there is provided an IL-1R-I binding polypeptide as defined herein which is capable of blocking IL-1R-I dependent signaling.

[0225] The half maximal inhibitory concentration (IC₅₀) is a measure of the effectiveness of a substance for inhibiting a specific quantifiable biological or biochemical function. This quantitative measure indicates how much of a particular substance is needed to inhibit a specific biological function by 50% and is commonly used in the art. In one particular embodiment, there is provided an IL-1R-I binding polypeptide as defined herein capable of blocking IL-1R-I signaling such that the half maximal inhibitory concentration (IC₅₀) of the blocking is at most 1×10⁻⁷ M, such as at most 5×10⁻⁸ M, such as at most 2×10⁻⁸ M, such as at most 1×10⁻⁸ M, such as at most 5×10⁻⁹ M, such as at most 2×10.9 M, such as at most 1×10⁻⁹ M, such as at most 5×10⁻¹⁰ M, such as at most 4×10⁻¹⁰ M, such as at most 3×10⁻¹⁰ M. In one embodiment, the half maximal inhibitory concentration (IC₅₀) of the blocking is between 1×10⁻¹⁵ M and 1×10⁻⁷ M, such as between 1×10⁻¹⁵ M and 1×10⁻⁸ M, such as between 1×10⁻¹⁵ M and 1×10⁻⁹ M, such as between 1×10⁻¹⁵ M and 1×10 10 M, such as between 1×10⁻¹⁵ M and 1×10⁻¹¹ M, such as between 1×10⁻¹⁵ M and 1×10⁻¹² M.

[0226] The terms “IL-1R-I binding” and “binding affinity for IL-1R-I” as used in this specification refer to a property of a polypeptide which may be tested for example by ELISA, Biolayer Interferometry (BLI) or the use of surface plasmon resonance (SPR) technology. For example as described in the examples below, IL-1R-I binding affinity may be tested in an experiment in which samples of the polypeptide are captured on antibody-coated ELISA plates and biotinylated IL-1R-I is added followed by streptavidin-conjugated HRP. TMB substrate is added and the absorbance at 450 nm is measured using a multi-well plate reader, such as Victor³ (Perkin Elmer). The skilled person may then interpret the results obtained by such experiments to establish at least a qualitative measure of the binding affinity of the polypeptide for IL-1R-I. If a quantitative measure is desired, for example to determine the EC₅₀ value (the half maximal effective concentration) for the interaction, ELISA may also be used. The response of the polypeptide against a dilution series of biotinylated IL-1R-I is measured using ELISA as described above. The skilled person may then interpret the results obtained by such experiments, and EC₅₀ values may be calculated from the results using for example GraphPad Prism 5 and non-linear regression.

[0227] IL-1R-I binding affinity may also be tested in an experiment in which IL-1R-I, or a fragment thereof, is immobilized on a sensor chip of a surface plasmon resonance (SPR) instrument, and the sample containing the polypeptide to be tested is passed over the chip. Alternatively, the polypeptide to be tested is immobilized on a sensor chip of the instrument, and a sample containing IL-1R-I, or a fragment thereof, is passed over the chip. The skilled person may then interpret the results obtained by such experiments to establish at least a qualitative measure of the binding affinity of the polypeptide for IL-1R-I. If a quantitative measure is desired, for example to determine a K_{D} value for the interaction, surface plasmon resonance methods may also be used. Binding values may for example be defined in a Biacore (GE Healthcare) or ProteOn XPR 36 (Bio-Rad) instrument. IL-1R-I is suitably immobilized on a sensor chip of the instrument, and samples of the polypeptide whose affinity is to be determined are prepared by serial dilution and injected in random order. K_{D} values may then be calculated from the results using for example the 1:1 Langmuir binding model of the BIAevaluation 4.1 software, or other suitable software, provided by the instrument manufacturer.

[0228] Thus, in one embodiment, there is provided an IL-1R-I binding polypeptide as defined herein, which is capable of binding to IL-1R-I such that the EC₅₀ value of the interaction is at most 1×10⁻⁷ M, such as at most 5×10⁻⁸ M, such as at most 1×10⁻⁸ M, such as at most 5×10⁻⁹ M, such as at most 1×10⁻⁹ M, such as at most 5×10⁻¹⁰ M, such as at most 4×10⁻¹⁰ M, such as at most 3×10⁻¹⁰ M, such as at most 2×10⁻¹⁰ M. In one embodiment, the EC₅₀ value of the interaction is between 1×10⁻¹⁵ M and 1×10⁻⁷ M, such as between 1×10⁻¹⁵ M and 1×10⁻⁸ M, such as between 1×10⁻¹⁵ M and 1×10⁻⁹ M, such as between 1×10⁻¹⁵ M and 5×10⁻¹⁰ M, such as between 1×10 15 M and 1×10⁻¹⁰ M, such as between 1×10⁻¹⁵ M and 5×10⁻¹¹ M, such as between 1×10⁻¹⁵ M and 1×10⁻¹¹ M, such as between 1×10⁻¹⁵ M and 5×10⁻¹² M, such as between 1×10⁻¹⁵ M and 1×10⁻¹² M.

[0229] In one particular embodiment, there is provided an IL-1R-I binding polypeptide which is capable of binding to IL-1R-I such that the K_{D} value of the interaction with IL-1R-I is at most 1×10⁻⁶ M, such as at most 1×10⁻⁷ M, such as at most 5×10⁻⁸ M, such as at most 4×10⁻⁸ M, such as at most 3×10⁻⁸ M, such as at most 2×10⁻⁸ M, such as at most 1×10⁻⁸ M, such as at most 7×10⁻⁹ M, such as at most 5×10⁻⁹ M, such as at most 4×10⁻⁹ M, such as at most 3×10⁻⁹ M, such as at most 2×10⁻⁹ M, such as at most 1×10⁻⁹ M, such as at most 9×10⁻¹⁰ M, such as at most 7×10⁻¹⁰ M, such as at most 5×10⁻¹⁰ M. In one embodiment, the K_{D} value of the interaction with IL-1R-I is between 1×10⁻¹⁵ M and 1×10⁻⁶ M, between 1×10⁻¹⁵ M and 1×10⁻⁷ M, such as between 1×10⁻¹⁵ M and 1×10⁻⁸ M, such as between 1×10⁻¹⁵ M and 1×10⁻⁹ M, such as between 1×10⁻¹⁵ M and 1×10⁻¹⁰ M, such as between 1×10⁻¹⁵ M and 1×10⁻¹¹ M, such as between 1×10⁻¹⁵ M and 1×10⁻¹² M.

[0230] In one embodiment, there is provided an IL-1R-I binding polypeptide as defined herein, wherein said IL-1R-I is human IL-1R-I or cynomolgus IL-1R-I, such as human IL-1R-I.

[0231] The IL-1R-I binding polypeptide as defined herein may be capable of blocking the interaction of IL-1R-I with IL-1 cytokines, such as the interaction of IL-1R-I with IL-1a and/or IL-1B. Thus, in one embodiment said IL-1R-I binding polypeptide is capable of blocking the interaction of IL-1R-I with IL-1 cytokines, such as the interaction of IL-1R-I with IL-1a and/or IL-1B.

[0232] The skilled person will understand that various modifications and/or additions can be made to an IL-1R-I binding polypeptide according to any aspect disclosed herein in order to tailor the polypeptide to a specific application without departing from the scope of the present disclosure.

[0233] For example, in one embodiment there is provided an IL-1R-I binding polypeptide as described herein, which polypeptide has been extended by and/or comprises additional amino acids at the C terminus and/or N terminus. Such a polypeptide should be understood as a polypeptide having one or more additional amino acid residues at the very first and/or the very last position in the polypeptide chain. Thus, an IL-1R-I binding polypeptide may comprise any suitable number of additional amino acid residues, for example at least one additional amino acid residue. Each additional amino acid residue may individually or collectively be added in order to, for example, improve production, purification, stabilization in vivo or in vitro, coupling or detection of the polypeptide. Such additional amino acid residues may comprise one or more amino acid residues added for the purpose of chemical coupling. One example of this is the addition of a cysteine residue. Additional amino acid residues may also provide a “tag” for purification or detection of the polypeptide, such as a His₆ tag, a (HisGlu)₃ tag (“HEHEHE” tag), a “myc” (c-myc) tag or a “FLAG” tag for interaction with antibodies specific to the tag or for immobilized metal affinity chromatography (IMAC) in the case of a His₆-tag.

[0234] The further amino acids as discussed above may be coupled to the IL-1R-I binding polypeptide by means of chemical conjugation (using known organic chemistry methods) or by any other means, such as expression of the IL-1R-I binding polypeptide as a fusion protein or joined in any other fashion, either directly or via a linker, for example an amino acid linker.

[0235] The further amino acids as discussed above may for example comprise one or more polypeptide domain(s). A further polypeptide domain may provide the IL-1R-I binding polypeptide with another function, such as for example yet another binding function, an enzymatic function, a toxic function, a fluorescent signaling function or combinations thereof.

[0236] A further polypeptide domain may moreover provide another IL-1R-I binding moiety with the same IL-1R-I binding function. Thus, in a further embodiment, there is provided an IL-1R-I binding polypeptide in a multimeric form. Said multimer is understood to comprise at least two IL-1R-I binding polypeptides as disclosed herein as monomer units, the amino acid sequences of which may be the same or different. Multimeric forms of the polypeptides may comprise a suitable number of domains, each having an IL-1R-I binding motif, and each forming a monomer within the multimer. These domains may have the same amino acid sequence, but alternatively, they may have different amino acid sequences. In other words, the IL-1R-I binding polypeptide of the invention may form homo- or heteromultimers, for example homo- or heterodimers. In one embodiment, there is provided an IL-1R-I binding polypeptide, wherein said monomeric units are covalently coupled together. In one embodiment, there is provided an IL-1R-I binding polypeptide, wherein said monomeric units are non-covalently coupled together. In another embodiment, said IL-1R-I binding polypeptide monomer units are expressed as a fusion protein. In one embodiment, there is provided an IL-1R-I binding polypeptide in dimeric form. One example of an IL-1R-I binding polypeptide which will form a disulphide bonded dimer after production is the polypeptide having the sequence set out in SEQ ID NO: 1658. The hinge region of IgG1 Fc (disclosed in FIGS. 1A-1BK as position 1-16 of SEQ ID NO: 1662) may be used to accomplish dimeric forms of IL-1R-I binding polypeptides.

[0237] Additionally, “heterogenic” fusion polypeptides or proteins, or conjugates, in which an IL-1R-I binding polypeptide as described herein, or a multimer thereof, constitutes a first domain, or first moiety, and the second and further moieties have other functions than binding to IL-1R-I, are also contemplated and fall within the ambit of the present disclosure. The second and further moiety/moieties of the fusion polypeptide or conjugate in such a protein suitably also have a desired biological activity.

[0238] Thus, in a second aspect of the present disclosure, there is provided a fusion protein or a conjugate, comprising a first moiety consisting of an IL-1R-I binding polypeptide according to the first aspect, and a second moiety consisting of a polypeptide having a desired biological activity. In another embodiment, said fusion protein or conjugate may additionally comprise further moieties, comprising desired biological activities that can be either the same or different from the biological activity of the second moiety.

[0239] Thus, in one embodiment, said IL-1R-I binding polypeptide comprises an IL-1R-I binding motif BM as set out in sequence i) or ii); a binding module BMod as set out in sequence iii) or iv), or an amino acid sequence as set out in any one of sequences v)-xxiv). In particular, said IL-1R-I binding motifs may correspond to an amino acid sequence from position 8 to 36; said binding modules may correspond to an amino acid sequence from position 7 to position 55; and said sequence xix), xxi), or xxiii) may be selected from the group consisting of sequences selected from SEQ ID NOs: shown in FIGS. 1A-1BK and listed above. Preferred embodiments of IL-1R-I binding polypeptides are disclosed in the first aspect.

[0240] Non-limiting examples of a desired biological activity comprise a therapeutic activity, a binding activity, and an in vivo half-life increasing activity.

[0241] In one embodiment, said desired biological activity is an in vivo half-life increasing activity such that said second moiety increases in vivo half-life of the fusion protein or conjugate.

[0242] An in vivo half-life increasing activity should in this context be understood as an activity which increases the in vivo half-life of the fusion protein or conjugate. The half-life of a first moiety (and possibly additional moieties) is increased by fusion or conjugation to a second moiety having an in vivo half-life increasing activity. It will be appreciated that the corresponding fusion protein or conjugate may comprise a first IL-1R-I binding moiety as described above, a second moiety having an in vivo half-life increasing activity, and optionally one or more additional moieties, such as an additional IL-1R-I binding moiety. For example, said fusion protein or conjugate may comprise two IL-1R-I binding polypeptides and a second moiety which increases in vivo half-life compared to the fusion or conjugate comprising the two IL-1R-I binding polypeptides only. Examples of fusion proteins comprising an IL-1R-I binding polypeptide and a half-life extending moiety have been produced and experimentally tested (Example 10). In one embodiment, said fusion protein or conjugate comprises a polypeptide having an amino acid sequence selected from the group consisting of SEQ ID NO:1639-1657.

[0243] Half-life extension of the resulting fusion protein or conjugate may be accomplished by a second moiety having an inherently long in vivo half-life. A polypeptide that increases the hydrodynamic size of the fusion protein or conjugate may for example impose an increased half-life upon the fusion protein or conjugate. Alternatively, the second moiety may consist of a natural protein having a long in vivo half-life, such as serum albumin or the Fc portion of an antibody.

[0244] In one embodiment, said second moiety comprises one of the albumin binding domain of streptococcal protein G or a derivative thereof; albumin; an Fc portion of an antibody, and transferrin. In one embodiment, said fusion protein or conjugate comprises a sequence selected from the group consisting of SEQ ID NO:1639-1658.

[0245] In one embodiment, said second moiety is an Fc portion of an antibody, such as an IgG1 Fc (SEQ ID NO:1662) or an IgG4 Fc. An IgG4 Fc that may be used as a half-life extending moiety is the Fc part set out in Uniprot, accession number P01861, amino acid residues 99-327. In one embodiment, said fusion protein or conjugate comprises a polypeptide having an amino acid sequence selected from the group consisting of SEQ ID NO: 1646-1654.

[0246] In one embodiment, said Fc portion of an antibody is a mutated Fc which relative to an unmutated form of Fc displays improved affinity to FcRn and/or reduced effector response. Thus, said Fc portion is a variant of a naturally occurring Fc in which one or more mutations have been introduced. For example, said fusion protein or conjugate comprises a polypeptide having an amino acid sequence selected from the group consisting of SEQ ID NO: 1734-1737.

[0247] In another non-limiting example, wherein said second moiety has in vivo half-life increasing activity, said second moiety is transferrin. In particular embodiments of the fusion protein or conjugate disclosed herein, there is provided a polypeptide selected from the group consisting of SEQ ID NO: 1657.

[0248] In one particular embodiment, the in vivo half-life increasing activity is an albumin binding activity. Non-limiting examples of moieties providing such an albumin binding activity are an albumin binding camelid Ig V_{HH} domain and an albumin binding engineered single Ig V_{H} domain.

[0249] In one embodiment, said albumin binding activity is provided by the albumin binding domain of the peptostreptococcal albumin binding (PAB) protein from Finegoldia magna, or a derivative thereof.

[0250] In one embodiment, said albumin binding activity is provided by the albumin binding domain of streptococcal protein G, or a derivative thereof. Examples of such an albumin binding domain are polypeptides having an amino acid sequence as set out in SEQ ID NO:1659-1661. Preferably, the albumin binding domain is as set out in SEQ ID NO:1661. In one embodiment, said fusion protein or conjugate comprises a polypeptide having an amino acid sequence selected from the group consisting of SEQ ID NO: 1639-1645.

[0251] In another non-limiting example, said in vivo half-life increasing activity is provided by a polyethylene glycol (PEG) or a hydroxyethyl starch (HES).

[0252] For example, said fusion protein or conjugate, comprising at least one further moiety, may comprise [IL-1R-I binding polypeptide]−[half-life increasing moiety]−[moiety with affinity for selected target]. It is to be understood that the three moieties in this example may be arranged in any order from the N- to the C-terminal of the polypeptide.

[0253] Another non-limiting example is a binding activity which allow the fusion protein to display a modified tissue distribution compared to the unfused IL-1R-I binding polypeptide. In one embodiment the binding activity is binding to the transferrin receptor. Such a binding activity could infer that the conjugate or fusion protein is transferred across the blood brain barrier and into the brain tissue (Yu et al, 2011, Sci Transl Med 3 (84):84ra44). In a preferred embodiment, such binding activity is provided by an antibody fragment.

[0254] Another non-limiting example of a binding activity is an activity which acts to block a biological activity.

[0255] In one embodiment, there is provided an IL-1R-I binding polypeptide, fusion protein or conjugate wherein the binding activity acts to block a biological activity.

[0256] With regard to the description above of fusion proteins or conjugates incorporating an IL-1R-I binding polypeptide according to the disclosure, it is to be noted that the designation of first, second and further moieties is made for clarity reasons to distinguish between an IL-1R-I binding polypeptide or polypeptides according to the invention on the one hand, and moieties exhibiting other functions on the other hand. These designations are not intended to refer to the actual order of the different domains in the polypeptide chain of the fusion protein or conjugate. Similarly, the designations first and second monomer units are made for clarity reasons to distinguish between said units. Thus, for example, said first moiety (or monomer unit) may without restriction appear at the N-terminal end, in the middle, or at the C-terminal end of the fusion protein or conjugate.

[0257] The skilled person is aware that the construction of a fusion protein often involves the use of linkers between the functional moieties to be fused, and there are different kinds of linkers with different properties, such as flexible amino acid linkers, rigid amino acid linkers and cleavable amino acid linkers. Linkers have been used to for example increase stability or improve folding of fusion proteins, to increase expression, improve biological activity, enable targeting and alter pharmacokinetics of fusion proteins. Thus, in one embodiment, the polypeptide according to any aspect disclosed herein further comprises at least one linker, such as at least one linker selected from flexible amino acid linkers, rigid amino acid linkers and cleavable amino acid linkers.

[0258] In one embodiment, said linker is arranged between a first moiety consisting of an IL-1R-I binding polypeptide as defined herein and a second moiety consisting of a polypeptide having a desired biological activity. In another embodiment, said linker is arranged within said first moiety. For example, one or more linker(s) may be arranged between monomeric units of the polypeptide as defined herein. In yet another embodiment, linkers may be arranged within said first moiety and between said first moiety and said second moiety.

[0259] Flexible linkers are often used in the art when the joined domains require a certain degree of movement or interaction, and may be particularly useful in some embodiments. Such linkers are generally composed of small, non-polar (for example G) or polar (for example S or T) amino acids. Some flexible linkers primarily consist of stretches of G and S residues, for example (GGGGS)ₚ. Adjusting the copy number “p” allows for optimization of linker in order to achieve appropriate separation between the functional moieties or to maintain necessary inter-moiety interaction. Apart from G and S linkers, other flexible linkers are known in the art, such as G and S linkers containing additional amino acid residues, such as T and A, to maintain flexibility, as well as polar amino acid residues to improve solubility. In one embodiment, said linker is a flexible linker comprising at least one amino acid residue(s) selected from the group consisting of glycine, serine and alanine. The skilled person is aware of other suitable linkers.

[0260] In one embodiment, said linker is selected from GS, VDSS, VDGS, VEGS, ASGS, (GGGGS)₂ (SEQ ID NO:1683), AS(GGGGS)₂ (SEQ ID NO: 1684) and ((KEAAA)₃KELAA)₂ (SEQ ID NO:1685). In one particular embodiment, said linker is AS(GGGGS)₂ (SEQ ID NO:1684) or ((KEAAA)₃KELAA)₂ (SEQ ID NO:1685). In one embodiment, said fusion protein or conjugate comprising a linker comprises a polypeptide having an amino acid sequence as set out in SEQ ID NO:1639-1658. In particular, an exemplary fusion protein or conjugate comprising the linker AS (GGGGS) 2 is set out in the amino acid sequence of SEQ ID NO:1646-1658, such as SEQ ID NO: 1648 and 1657.

[0261] In further aspects of the present disclosure, there is provided a polynucleotide encoding an IL-1R-I binding polypeptide or a fusion protein as described herein; an expression vector comprising said polynucleotide; and a host cell comprising said expression vector.

[0262] Also encompassed by this disclosure is a method of producing a polypeptide or fusion protein as described above, comprising culturing said host cell under conditions permissive of expression of said polypeptide from its expression vector, and isolating the polypeptide.

[0263] The IL-1R-I binding polypeptide of the present disclosure may alternatively be produced by non-biological peptide synthesis using amino acids and/or amino acid derivatives having protected reactive side-chains, the non-biological peptide synthesis comprising
[0264] step-wise coupling of the amino acids and/or the amino acid derivatives to form a polypeptide according to the first aspect having protected reactive side-chains,
[0265] removal of the protecting groups from the reactive side-chains of the polypeptide, and
[0266] folding of the polypeptide in aqueous solution.

[0267] It should be understood that the IL-1R-I binding polypeptide according to the present disclosure may be useful as a therapeutic, diagnostic or prognostic agent in its own right or as a means for targeting other therapeutic or diagnostic agents, with e.g. direct or indirect effects on IL-1R-I. A direct therapeutic effect may for example be accomplished by inhibiting IL-1R-I signaling.

[0268] Thus, in another aspect, there is provided a composition comprising an IL-1R-I binding polypeptide, fusion protein or conjugate as described herein and at least one pharmaceutically acceptable excipient or carrier. In one embodiment, said composition further comprises at least one additional active agent, such as at least two additional active agents, such as at least three additional active agents. Non-limiting examples of additional active agents that may prove useful in such combination are immune response modifying agents and anti-cancer agents as described herein. In one embodiment, said composition comprises a fusion protein or conjugate wherein said desired biological activity is an in vivo half-life increasing activity such that said second moiety increases in vivo half-life of the fusion protein or conjugate. Examples of moieties providing such half-life increasing activities are disclosed elsewhere herein.

[0269] Hence, in another aspect of the present disclosure, there is provided an IL-1R-I binding polypeptide, fusion protein, conjugate or composition as described herein for use as a medicament, a prognostic agent or a diagnostic agent. In one embodiment, said IL-1R-I binding polypeptide is provided for use as a medicament.

[0270] In one embodiment, there is provided an IL-1R-I binding polypeptide, fusion protein or conjugate or composition as described herein, for use as a medicament to modulate IL-1R-I function in vivo. As used herein, the term “modulate” refers to changing the activity, such as rendering IL-1R-I function hypomorph, partially inhibiting or fully inhibiting IL-1R-I function.

[0271] In one embodiment, there is provided an IL-1R-I binding polypeptide, fusion protein or conjugate or composition as described herein, for use, in the treatment, prognosis or diagnosis of an IL-1R-I related disorder.

[0272] As used herein, the term “IL-1R-I related disorder” refers to any disorder, disease or condition in which IL-1R-I plays a regulatory role in the signaling pathway. Thus, in one embodiment, there is provided an IL-1R-I binding polypeptide, fusion protein or conjugate or composition as described herein, for use in the treatment of an IL-1R-I related disorder, such as a disorder selected from the group consisting of inflammatory disease, auto-inflammatory syndrome, autoimmune disease, infectious disease, cardiovascular disease, ischaemic disease, cancer and diabetes. In one embodiment, said IL-1R-I related disorder is selected from the group consisting of inflammatory disease, autoinflammatory syndrome and autoimmune disease.

[0273] In one embodiment, said IL-1R-I related disorder is selected from the group consisting of familial Mediterranean fever (FMF); cryopyrin-associated periodic syndrome (CAPS); TNF receptor-associated periodic syndrome (TRAPS); hyper-IgD syndrome (HIDS); periodic fever; aphthous stomatitis; pharyngitis; adenitis (PFAPA); rheumatoid arthritis (RA), juvenile RA, juvenile idiopathic arthritis, systemic juvenile idiopathic arthritis; adult-onset Still's disease; Schnitzler syndrome; Muckle Wells Syndrome; macrophage activation syndrome; Behçet's disease; uveitis; acne vulgaris; pyoderma gangrenosum; gout; type 2 diabetes, new-onset diabetes; dry eye syndrome; hidradenitis suppurativa; neutrophilic dermatoses, in particular cytophagic histiocytic panniculitis, Weber-Christian disease, and neutrophilic panniculitis; cardiovascular disease, myocardial infarction, stroke; liver failure, kidney failure; acute lung injury; pseudogout, calcium-pyrophosphate deposition disorder, chondrocalcinosis, deficiency of the IL-1 receptor antagonist (DIRA), deficiency of the IL-36 receptor antagonist (DITRA), ADAM2 deficiency (DADA2), pyogenic arthritis, pyoderma gangrenosum and acne (PAPA) syndrome, pyoderma gangrenosum, acne and suppurative hidradenitis (PASH) syndrome, PAPA and suppurative hidradenitis (PAPASH) syndrome, autoinflammatory syndrome with lymphedema (AISLE), Phospholipase C-gamma-2 mutation autoinflammatory syndrome, NALP12-associated periodic syndrome (NAPS12), mevalonate kinase deficiency (MKD), psoriatic arthritis, reactive arthritis, ankylosing spondylitis, haemochromatosis-related arthritis, periarticular calcinosis, osteoarthritis, inflammatory osteoarthritis, hand osteoarthritis, pustular psoriasis such as generalised pustular psoriasis (GPP), palmoplantar pustulosis (PPP), acrodermatitis continua of Hallopeau (ACH); Blau syndrome; Sweet syndrome; various vasculitides such as giant-cell arteritis (GCA), polymyalgia rheumatica (PMR), Takayasu arteritis, Kawasaki disease, urticarial vasculitis, and Henoch-Schönlein purpura (HSP); neutrophilic urticaria and idiopathic cold urticaria; lichen planus; polymyositis, dermatomyositis, juvenile dermatomyositis and inclusion-body myositis; various stages of myeloma such as smoldering myeloma (SMM), indolent myeloma, Waldenstrom's macroglobulinemia, and multiple myeloma; tumor-induced cachexia; solid tumor growth; neonatal disorders such as bronchopulmonary dysplasia (prophylaxis), necrotising enterocolitis (NEC), retinopathy of prematurity (ROP), cerebral palsy due to perinatal cerebral ischemia, and infant respiratory distress syndrome (IRDS); Whipple's disease; traumatic brain injury; refractory epilepsy; systemic inflammatory response syndrome (SIRS); cutaneous lupus; Jessner-Kanof disease; amyotrophic lateral sclerosis; systemic sclerosis (scleroderma); septic shock; acute pancreatitis; chronic recurrent multifocal osteomyelitis, non-bacterial osteitis (NBO), synovitis, acne, pustulosis, hyperostosis, osteitis (SAPHO) syndrome, and Majeed syndrome; relapsing polychondritis; idiopathic recurrent pericarditis (IRP); myocarditis; Erdheim-Chester disease; juvenile xantogranuloma; islet-cell transplantation; haemodialysis-induced systemic inflammation; graft-versus-host disease; ANCA-associated glomerulonephritis and recurrent glomerulonephritis; Cogan syndrome; autoimmune inner-ear disease; chronic granulomatous disease (CGD); Castleman's disease; cardiac failure; diastolic cardiac failure; antisynthetase syndrome; acute ACL injury; acute haemorrhagic leukoencephalitis; AA amyloidosis; Di George syndrome; generalised fatigue; chronic fatigue syndrome (CFS); gulf-war illness (GWI); and narcolepsy.

[0274] In another embodiment, said IL-1R-I related disorder is cancer, such as a cancer selected from the group consisting of colon cancer, breast cancer, lung cancer, head and neck cancer, melanoma and prostate cancer.

[0275] The skilled person will appreciate that said IL-1R-I binding polypeptide, fusion protein or conjugate or a composition comprising an anti-IL-1R-I binding polypeptide, fusion protein or conjugate as described herein may be administered to a subject using standard administration techniques, including oral, topical, intravenous, intraperitoneal, subcutaneous, pulmonary, transdermal, intramuscular, intranasal, buccal, sublingual, duodenal or suppository administration. Thus, in one embodiment, there is provided an IL-1R-I binding polypeptide, fusion protein or conjugate or a composition as described herein for oral, topical, intravenous, intraperitoneal, subcutaneous, pulmonary, transdermal, intramuscular, intranasal, buccal, sublingual, duodenal or suppository administration. In one embodiment, said administration is oral, intravenous, subcutaneous or duodenal administration and in one particular embodiment, said administration is oral administration.

[0276] As used herein, the term “subject” refers to a mammalian subject, such as a human subject.

[0277] Non-limiting examples of indications where topical administration routes could be especially relevant in IL-1R-I mediated disease include ocular diseases such as dry eye disease, uveitis, scleritis, and ulcerative keratitis; dermatological diseases such as ichtyosis and generalized pustular psoriasis; pulmonary diseases such as adult respiratory distress syndrome, bronchopulmonary dysplasia, chronic obstructive pulmonary disease, asbestosis, and silicosis.

[0278] In some embodiments it may be beneficial that the polypeptide, fusion protein, conjugate or composition for use as described above, is administered repeatedly within a period of time, for example within a 24 hour period from disease onset. In one particular embodiment wherein said IL-1R-I binding polypeptide, fusion protein, conjugate or composition is administered repeatedly within a 24 hour period from disease onset, such as at least two times within a 24 hour period from disease onset, such as at least three times within a 24 hour period from disease onset, to a subject in need thereof. In yet a particular embodiment, said IL-1R-I binding polypeptide, fusion protein, conjugate or composition is administered continuously during a limited time period such as during 24 hours from disease onset. Repeated or continuous administration may be preferred when distribution to the brain is required, such as in acute treatment of stroke.

[0279] In some embodiments wherein said fusion protein or conjugate comprises a second moiety having an in vivo half-life increasing activity, said fusion protein or conjugate, or composition comprising such a fusion protein or conjugate, is administered once weekly to a subject in need thereof.

[0280] In a related aspect, there is provided a method of treatment of an IL-1R-I related disorder, comprising administering to a subject in need thereof an effective amount of an IL-1R-I binding polypeptide, fusion protein, conjugate or a composition as described herein. In a more specific embodiment of said method, the IL-1R-I binding polypeptide, fusion protein, conjugate or composition as described herein modulates IL-1R-I function in vivo.

[0281] In one embodiment, said IL-1R-I related disorder is selected from the group as defined above in connection with the previous aspect.

[0282] In some embodiments of said method of treatment, it may be beneficial that the polypeptide, fusion protein, conjugate or composition as described above, is administered repeatedly within a period of time, for example within a 24 hour period from disease onset. In one particular embodiment wherein said IL-1R-I binding polypeptide, fusion protein, conjugate or composition is administered repeatedly within a 24 hour period from disease onset, such as at least two times within a 24 hour period from disease onset, such as at least three times within a 24 hour period from disease onset, to a subject in need thereof. In yet a particular embodiment, said IL-1R-I binding polypeptide, fusion protein, conjugate or composition is administered continuously during a limited time period, such as within 24 hours from disease onset. Repeated or continuous administration may be preferred when distribution to the central nervous system is required, such as in acute treatment of stroke.

[0283] In other embodiments, of said method of treatment, said fusion protein or conjugate comprises a second moiety having an in vivo half-life increasing activity, or said composition comprises a fusion protein or conjugate comprising a second moiety having an in vivo half-life increasing activity. In such methods, said fusion protein, conjugate or composition may be administered once weekly to a subject in need thereof.

[0284] It may be beneficial to administer a therapeutically effective amount of an IL-1R-I binding polypeptide, fusion protein or conjugate or composition as described herein and at least one second drug substance, such as an immune response modulating agent as described above or an anti-cancer agent.

[0285] As used herein, the term “co-administration” encompasses both concomitant and sequential administration. Thus, in one embodiment there is provided a method as defined above further comprising co-administration of an immune response modulating agent as described above. In another embodiment there is provided a method as defined above further comprising co-administration of an anti-cancer agent as described above.

[0286] In another aspect of the present disclosure, there is provided a method of detecting IL-1R-I, comprising providing a sample suspected to contain IL-1R-I, contacting said sample with an IL-1R-I binding polypeptide, fusion protein, conjugate or a composition as described herein, and detecting the binding of the IL-1R-I binding polypeptide, fusion protein, conjugate or composition to indicate the presence of IL-1R-I in the sample. In one embodiment, said method further comprises an intermediate washing step for removing non-bound polypeptide, fusion protein, conjugate or composition, after contacting the sample.

[0287] While the invention has been described with reference to various exemplary aspects and embodiments, it will be understood by those skilled in the art that various changes may be made and equivalents may be substituted for elements thereof without departing from the scope of the invention. In addition, many modifications may be made to adapt a particular situation or molecule to the teachings of the invention without departing from the essential scope thereof. Therefore, it is intended that the invention not be limited to any particular embodiment contemplated, but that the invention will include all embodiments falling within the scope of the appended claims.

### BRIEF DESCRIPTION OF THE FIGURES

[0288] FIGS. 1A-1BK are listings of the amino acid sequences of examples of IL-1R-I binding polypeptides of the present disclosure (SEQ ID NO:1-1638 and 1667-1679), albumin binding polypeptides (SEQ ID NO:1659-1661); human IgG1 Fc (SEQ ID NO:1662), human albumin (SEQ ID NO:1663) and human transferrin (SEQ ID NO:1664), examples of IL-1R-1 binding fusion polypeptides comprising said polypeptides (SEQ ID NO:1639-1658 and 1734-1737) optionally including a linker, control polypeptides (GS-hIL-1β, SEQ ID NO: 1733) as well as the amino acid sequences of cynomolgus IL-1R-I-His₆ (SEQ ID NO:1665) and cynomolgus IL-1R-I-Fc (SEQ ID NO:1666) used for selection, screening and/or characterization for illustration of the invention. The deduced IL-1R-I binding motifs (BMs) of the IL-1R-I binding polypeptides disclosed herein extend from residue 8 to residue 36 in sequences with SEQ ID NO: 1-1638 and 1667-1668 and 1670-1679. In SEQ ID NO:1669, said BM extends from residue 5 to residue 33. The amino acid sequences of the 49 amino acid residues long polypeptides (BMod) predicted to constitute the complete three-helix bundle within each of these Z variants extend from residue 7 to residue 55, except for the N-terminally truncated Z variant with SEQ ID NO:1669 wherein it extends from residue 4 to residue 52.

[0289] FIG. 2 is a diagram showing concentration-response curves for inhibition of IL-1B induced IL-6 release in NHDF cells for six anti-IL-1R-I binding fusion proteins (PSI0536, SEQ ID NO:1648; PSI0537, SEQ ID NO: 1649; PSI0534, SEQ ID NO: 1646; PSI0535, SEQ ID NO: 1647; PSI0538, SEQ ID NO:1650; PSI0539, SEQ ID NO:1651). Anakinra (dotted line) was included as a reference.

[0290] FIG. 3 is a diagram showing concentration of IL-1R-I binding Z variants at 50% inhibition (IC₅₀) of IL-1B induced IL-6 release in human whole blood from five to ten individual donors. The median IC₅₀ was 0.31, 1.25 and 0.30 nM for PSI0536 (SEQ ID NO:1648), PSI537 (SEQ ID NO:1649) and anakinra, respectively.

### EXAMPLES

### Summary

[0291] The following Examples disclose the development of novel Z variant molecules targeted to interleukin 1 receptor I (IL-1R-I) based on phage display technology. The IL-1R-I binding polypeptides described herein were sequenced, and their amino acid sequences are listed in FIGS. 1A-1BK with the sequence identifiers SEQ ID NO:1-1632. Additional IL-1R-I binding polypeptides disclosed herein are listed in FIGS. 1A-1BK with sequence identifiers SEQ ID NO:1633-1638 and 1667-1679. The Examples further describe the characterization of IL-1R-I binding polypeptides and in vitro functionality of said polypeptides. As used herein, the term “IL-1R-I binding Z variants” refers to 58 amino acid long IL-1R-I binding polypeptides comprising an IL-1R-I binding motif as disclosed herein.

### Example 1

Selection and screening of IL-1R-I binding Z variants

[0292] In this Example, human and cynomolgus IL-1R-I (hIL-1R-I and cIL-1R-I, respectively) were used as target proteins in phage display selections using a phage library of Z variants. The DNA of selected clones was sequenced, the Z variants were produced in E. coli as periplasmic fractions and assayed against IL-1R-I in ELISA (enzyme-linked immunosorbent assay).

### Materials and Methods

[0293] Biotinylation of target protein: Human IL-1R-I-Fc (hIL-1RI-Fc Creative BioMart cat. no. IL1RI-771H) and human IL-1R-I (hIL-1RI, RnD Systems cat. no. 269-1R/CF) were biotinylated according to the manufacturer's recommendations at room temperature (RT) for 30 min using No-Weigh EZ-Link Sulfo-NHS-LC-Biotin (Thermo Scientific, cat. no. 21327) at a 10×molar excess. Prior to the biotinylation, a buffer exchange to phosphate buffered saline (PBS, 10 mM phosphate, 137 mM NaCl, 2.68 mM KCl, pH 7.4) was performed for hIL-1R-I-Fc using a dialysis cassette (Slide-a-lyzer 3.5 K, 3500 MWCO, Thermo Scientific, cat. no. 66333), according to the manufacturer's instructions, and hIL-1R-I was dissolved in 100 mM phosphate buffer pH 6.5. After the biotinylation, a buffer exchange to PBS was performed for both proteins, as described above.

[0294] Expression of his-tagged target protein: Expression of cynomolgus IL-1R-I-His₆ (cIL-1R-I-His₆, SEQ ID NO:1665) was performed using the FreeStyle 293-F expression system (Thermo Fisher Scientific), essentially according to the manufacturer's protocol. Supernatants were harvested by centrifugation 5 days after transfection of expression vectors and stored at −70° C. The frozen supernatant from the FreeStyle 293-F cultures were thawed and filtrated (0.22 μm). The supernatant, containing the cIL-1R-I-His₆ was purified using affinity chromatography with an IMAC column. The purified protein was buffer exchanged to PBS. The purity of the protein was analyzed by SDS-PAGE stained with Coomassie Blue and the molecular weight was analyzed using mass spectrometry (HPLC/MS or MALDI-TOF/MS).

[0295] Phage display selection of IL-1R-I binding Z variants: A library of random variants of protein Z displayed on bacteriophage in fusion to a wild type albumin binding domain (abbreviated ABD001, SEQ ID NO:1660) was used to select IL-1R-I binding Z variants. The library, which is denoted Zlib006Naive.II, has a size of 1.5×10¹⁰ library members (Z variants). The construction in the phage library vector pAY02592 and the phage stock production was previously described in WO 2016/113246.

[0296] Selections against hIL-1R-I-Fc, biotinylated hIL-1R-I-Fc (b-hIL-1R-I-Fc), biotinylated hIL-1R-I (b-hIL-1R-I) and cIL-1R-I-His₆ (SEQ ID NO:1665) were performed in four selection cycles. In the first cycle, four selection tracks were run in parallel; 1-1 to 1-4. The selection tracks 1-1 and 1-4 were divided into two parts in cycle two, resulting in a total of six parallel tracks in round 2, 3 and 4; 2-1 to 2-9, 3-1 to 3-9 and 4-1 to 4-9, respectively, as presented in Table 2. The number of phage particles used for selections was more than 2000 times the number of eluted phage particles in the previous cycle, but a lower amount was used in selection tracks 4-1 to 4-5. Phage stock preparation, selection procedure and amplification of phage between selection cycles were performed essentially as described in WO 2009/077175 with the following exceptions 1-8. Exception 1: PBS supplemented with 10% fetal calf serum (FCS, Gibco, cat. no. 10108-165), 1.5 UM human serum albumin (HSA, Novozymes, cat. no. 230-005) and 0.1% Tween20 (Acros Organics, cat. no. 233362500) was used as selection buffer. Exception 2: pre-selection was performed in cycles 1-4 at >60 min at RT or overnight at 4° C. by incubation of phage stock with Dynabeads® M-280 Streptavidin (SA beads, Life technologies/Invitrogen, cat. no. 11206D), SA beads pre-coated with biotinylated human IgG1-Fc (b-hFc, Jackson Immuno Research cat. no. 009-060-008) (Fc/SA beads), SA beads pre-coated with b-hFc and (Z00000) 2-Cys-biotin, prepared essentially as described in WO 2009/077175 (Fc/Z00000/SA beads), protein A beads (Life technologies/Novex, cat. no. 10002D) pre-coated with b-hFc (Fc/protein A beads) or Dynabeads® His-Tag Isolation and Pulldown (IM beads, Life Technologies/Novex, cat. no. 10104D), respectively, as presented in Table 2. b-hFc was incubated with the beads (5, 8.5 or 10 μg b-hFc per mg Z00000/SA beads, protein A beads or SA beads, respectively) for >1 h at RT, then the beads were washed with 2×PBST (PBS supplemented with 0.1% Tween20) before use in pre-selection. Exception 3: all tubes and beads used in the selections were pre-blocked with PBS supplemented with 3% BSA (bovine serum albumin, Sigma cat. no. A3059) and 0.1% Tween20. Exception 4: selections were performed in solution at RT and the time for selection was 140 min in the first cycle and 120 min in the following cycles. Exception 5: target-phage complexes were captured on beads using the following amount of target protein and beads: 3.2 μg hIL-1R-I-Fc per mg Z00000/SA beads, 4 μg hIL-1R-I-Fc per mg protein A beads, 2 μg b-hIL-1R-I-Fc or 2 μg b-hIL-1R-I per mg SA beads and 4.5 μg CIL-1R-I-His₆ per mg IM beads, respectively. The bead type used for each selection track is the same as presented for pre-selection in Table 2. Exception 6: E. coli strain ER2738 cells (Lucigen, Middleton, WI, USA) grown in medium supplemented with 10 μg/ml tetracycline were used for phage infection. Exception 7: a 5×excess of M13K07 helper phage compared to bacteria was allowed to infect log phase bacteria. Exception 8: amplification of phage particles after round 2 and 3 was performed essentially as described in WO 2016/113246; Example 5, but using Tryptic Soy Broth+Yeast Extract (TSB-YE) medium supplemented with 100 μM IPTG, 25 μg/ml kanamycin, 100 μg/ml ampicillin and 2% glucose in the overnight culture.

[0297] An overview of the selection strategy, describing an increased stringency in the selection cycles obtained by using a lowered target concentration and an increased number of washes, is shown in Table 2.

TABLE 2
Overview of the phage display selection from a naive library.

| | | Phage stock | | | Target | Number |
|---|---|---|---|---|---|---|
| | Selection | from library or | Preselection | | concentration | of |
| Cycle | track | selection track | beads | Target | (nM) | washes |
| 1 | 1-1 | Zlib006Naive.II | Fc/Z00000/SA | hIL-1R-I-Fc | 100 | 2 |
| 1 | 1-2 | Zlib006Naive.II | Fc/protein A | hIL-1R-I-Fc | 100 | 2 |
| 1 | 1-3 | Zlib006Naive.II | Fc/SA | b-hIL-1R-I-Fc | 100 | 2 |
| 1 | 1-4 | Zlib006Naive.II | SA | b-hIL-1R-I | 100 | 2 |
| 2 | 2-1 | 1-1 | Fc/Z00000/SA | hIL-1R-I-Fc | 67 | 4 |
| 2 | 2-2 | 1-1 | Fc/Z00000/SA | hIL-1R-I-Fc | 33 | 4 |
| 2 | 2-3 | 1-2 | Fc/protein A | hIL-1R-I-Fc | 67 | 4 |
| 2 | 2-5 | 1-3 | Fc/SA | b-hIL-1R-I-Fc | 67 | 4 |
| 2 | 2-7 | 1-4 | SA | b-hIL-1R-I- | 67 | 4 |
| 2 | 2-9 | 1-4 | IM | cIL-1R-I-His₆ | 67 | 4 |
| 3 | 3-1 | 2-1 | Fc/Z00000/SA | hIL-1R-I-Fc | 44 | 6 |
| 3 | 3-2 | 2-2 | Fc/Z00000/SA | hIL-1R-I-Fc | 11 | 6 |
| 3 | 3-3 | 2-3 | Fc/protein A | hIL-1R-I-Fc | 44 | 6 |
| 3 | 3-5 | 2-5 | Fc/SA | b-hIL-1R-I-Fc | 44 | 6 |
| 3 | 3-7 | 2-7 | SA | b-hIL-1R-I | 44 | 6 |
| 3 | 3-9 | 2-9 | SA | b-hIL-1R-I | 44 | 6 |
| 4 | 4-1 | 3-1 | Fc/Z00000/SA | hIL-1R-I-Fc | 30 | 8 |
| 4 | 4-2 | 3-2 | Fc/Z00000/SA | hIL-1R-I-Fc | 3.7 | 8 |
| 4 | 4-3 | 3-3 | Fc/protein A | hIL-1R-I-Fc | 30 | 8 |
| 4 | 4-5 | 3-5 | Fc/SA | b-hIL-1R-I-Fc | 30 | 8 |
| 4 | 4-7 | 3-7 | SA | b-hIL-1R-I | 30 | 8 |
| 4 | 4-9 | 3-9 | IM | cIL-1R-I-His₆ | 30 | 8 |

[0298] Washes were performed for 1 min using PBST 0.1%, and elution was carried out as in the protocol for bead bound phage/target complexes eluted at pH 2 described in WO 2009/077175.

[0299] Production of Z variants for ELISA: The Z variants were produced essentially as described in WO 2016/113246 with the exception that the final volume of pellet dissolving from the 1 ml culture was 1000 μl PBST 0.05% (PBS supplemented with 0.05% Tween20).

[0300] The final supernatant of the periplasmic extract contained the Z variants as fusions to ABD (Z-ABD; ABD001, SEQ ID NO:1660), expressed as AQHDEALE-[Z#####]-VDYV-[ABD]-YVPG (Grönwall et al. (2007) J Biotechnol, 128:162-183). Z##### refers to individual 58 amino acid residue Z variants.

[0301] ELISA screening of Z variants: The binding of Z variants to human IL-1R-I was analyzed in ELISA, essentially as described in WO 2016/113246, using 1 nM hIL-1R-I-Fc as target, and using a goat anti-human IgG-HRP (Southern Biotech, cat. no. 2040-05) diluted 1:10,000 for detection. As blank control, PBST 0.05% was added instead of the Z-ABD periplasmic sample and as negative control, a periplasmic extract with ABD001 (SEQ ID NO: 1660) was added instead of the Z-ABD periplasmic sample. Control plates were assayed in a similar setup using 100 nM b-hFc instead of target protein and streptavidin conjugated HRP (Thermo Scientific, cat. no. N100) diluted 1:30,000 for detection.

[0302] Sequencing: In parallel with the ELISA screening, the clones were picked for sequencing. PCR fragments, amplified from single colonies, were sequenced and analyzed essentially as described in WO 2009/077175.

[0303] EC₅₀ analysis of Z variants: A selection of IL-1R-I binding Z variants was subjected to an analysis of response against a dilution series of hIL-1R-I-Fc using ELISA as described above. The target protein hIL-1R-I-Fc was diluted stepwise 1:10 from 100 to 0.01 nM. As a background control, the Z variants were assayed with no target protein added. Obtained data was analyzed using GraphPad Prism 5 and non-linear regression, and the EC₅₀ values (the half maximal effective concentration) were calculated.

### Results

[0304] Phage display selection of IL-1R-I binding Z variants: Individual clones were obtained after four cycles of phage display selections against human and cynomolgus IL-1R-I.

[0305] ELISA screening of Z variants: The clones obtained after four cycles of selection were produced individually in 96-well plates and were screened for hIL-1R-I-Fc binding activity in ELISA using 1 nM target protein. In parallel, an ELISA to exclude Fc binding was run. Clones positive to hIL-1R-I were identified and none of the IL-1R-I positive clones were positive to Fc solely. No response was obtained for the ABD negative control. 45 identified Z variants displayed an ELISA screening result that was more than 0.71 AU (8.5× the control background).

[0306] Sequencing: In parallel with ELISA screening, sequencing was performed for clones obtained after four cycles of selection. Each variant was given a unique identification number #####, and individual variants are referred to as Z#####. The amino acid sequences of a subset of the identified 58 amino acid residues long Z variants are listed in FIGS. 1A-1BK and in the sequence listing as SEQ ID NO:1-19. The deduced IL-1R-I binding motifs extend from residue 8 to residue 36 in each sequence. The amino acid sequences of the 49 amino acid residues long polypeptides predicted to constitute the complete three-helix bundle within each of these Z variants extend from residue 7 to residue 55.

[0307] EC₅₀ analysis of Z variants: A subset of said Z variants (SEQ ID NO:1-19) was subjected to an ELISA target titration using hIL-1R-I-Fc. Obtained results were used for calculation of EC₅₀ values (Table 3).

TABLE 3
Calculated EC₅₀ values from ELISA titration analysis.

| Z variant | SEQ ID NO | EC₅₀ (M) |
|---|---|---|
| Z12884 | 13 | 6.4 × 10⁻¹⁰ |
| Z12891 | 19 | 2.2 × 10⁻⁹ |
| Z12895 | 12 | 2.3 × 10⁻¹⁰ |
| Z12905 | 7 | 7.3 × 10⁻⁹ |
| Z12910 | 11 | 2.3 × 10⁻¹⁰ |
| Z12911 | 18 | 3.2 × 10⁻¹⁰ |
| Z12912 | 10 | 3.9 × 10⁻¹⁰ |
| Z12915 | 5 | 4.3 × 10⁻⁹ |
| Z12917 | 15 | 3.3 × 10⁻¹⁰ |
| Z12920 | 14 | 6.6 × 10⁻⁹ |
| Z12922 | 3 | 2.9 × 10⁻⁹ |
| Z12929 | 17 | 1.7 × 10⁻⁸ |
| Z12933 | 2 | 1.5 × 10⁻⁹ |
| Z12941 | 4 | 4.6 × 10⁻¹⁰ |
| Z12961 | 16 | 2.9 × 10⁻¹⁰ |
| Z12964 | 1 | 3.9 × 10⁻¹⁰ |
| Z12967 | 9 | 1.7 × 10⁻¹⁰ |
| Z12974 | 8 | 2.1 × 10⁻¹⁰ |
| Z12975 | 6 | 2.6 × 10⁻¹⁰ |

### Example 2

### Production and Characterization of Primary IL-1R-I Binding Z Variants

[0308] This Example describes the general procedure for subcloning and production of His-tagged Z variants originating from the primary phage selection, characterization of their target binding, target blocking and melting points.

### Materials and Methods

[0309] Subcloning of Z variants with a Hiss tag: The DNA of respective Z variant was amplified from the phage library vector pAY02592. A subcloning strategy for construction of monomeric Z variant molecules with N-terminal His₆ tag was applied using standard molecular biology techniques. The Z gene fragments were subcloned into an expression vector resulting in the encoded sequence MGSSHHHHHHLQ-[Z#####]-VD.

[0310] Cultivation: E. coli T7E2 cells (GeneBridges) were transformed with plasmids containing the gene fragment of each respective IL-1R-I binding Z variant. The resulting recombinant strains were cultivated in media supplemented with 50 μg/ml kanamycin, either at 30° C. in 50 ml scale using the EnPresso protocol (BioSilta), or at 37° C. in 930 ml TSB-YE medium. In order to induce protein expression, IPTG was added to a final concentration of 0.2 mM at OD600≈10 (EnPresso) or 2 (TSB+YE). After induction, the cultivations were incubated for 16 h (EnPresso) or 5 h (TSB+YE). The cells were harvested by centrifugation.

[0311] Purification of IL-1R-I binding Z variants with a His₆ tag: Approximately 1-2 g of each cell pellet was resuspended in binding buffer (20 mM sodium phosphate, 0.5 M NaCl, 20 mM imidazole, pH 7.4) supplemented with Benzonase® (Merck). After cell disruption, cell debris was removed by centrifugation and each supernatant was applied on a 1 ml His GraviTrap IMAC column (GE Healthcare). Contaminants were removed by washing with wash buffer (20 mM sodium phosphate, 0.5 M NaCl, 60 mM imidazole, pH 7.4) and the Z variants were subsequently eluted with elution buffer (20 mM sodium phosphate, 0.5 M NaCl, 500 mM imidazole, pH 7.4). After the IMAC purification, the buffer was exchanged to PBS (2.68 mM KCl, 137 mM NaCl, 1.47 mM KH₂PO₄, 8.1 mM Na₂HPO₄, pH 7.4) using PD-10 desalting columns (GE Healthcare). All Z variants were subjected to a second purification step. Each Z variant was loaded on a 1 ml Resource 15RPC column (GE Healthcare), previously equilibrated with RPC solvent A (0.1% TFA, 10% ACN, 90% water). After column wash with RPC solvent A, bound proteins were eluted with a linear gradient 0-50% RPC solvent B (0.1% TFA, 80% ACN, 20% water) for 20 ml. The buffer was then exchanged to PBS (2.68 mM KCl, 137 mM NaCl, 1.47 mM KH₂PO₄, 8.1 mM Na₂HPO₄, pH 7.4) using PD-10 desalting columns (GE Healthcare).

[0312] Protein concentrations were determined by measuring the absorbance at 280 nm, using a NanoDrop® ND-1000 spectrophotometer (Saveen Werner AB) and the extinction coefficient of the respective protein. Samples with a concentration less than approximately 1 mg/ml were concentrated using Amicon Ultra-4, Ultracel-3K (MerckMillipore). The purity was analyzed by SDS-PAGE stained with Coomassie Blue and the identity of each purified Z variant was confirmed using LC/MS analysis.

[0313] Biacore affinity analysis: Affinities (K_{D}) for human and cynomolgus IL-1R-I were determined for His₆-tagged Z variants using a Biacore 2000 instrument (GE Healthcare). hIL-1R-I or cIL-1R-I-His₆ was immobilized on the carboxylated dextran layer in different flow cells of a CM5 chip (GE Healthcare, cat. no. BR100012). The immobilization was performed using amine coupling chemistry according to the manufacturer's protocol. Acetate pH 4.5 (GE Healthcare, cat. no. BR100350) was used for ligand dilution and HBS-EP (GE Healthcare, cat. no. BR100188) was used as running buffer. One flow cell surface on the chip was activated and deactivated for use as blank during analyte injections. In the kinetic experiment, HBS-EP was used as running buffer, the flow rate was 50 μl/min and the temperature was 25° C. The analytes, i.e. the Z variants, were each diluted in HBS-EP buffer to final concentrations of 40 nM and 10 nM, and were injected over the target chip surfaces for 2 min, followed by dissociation in running buffer for 8 min. Kinetic constants were calculated from the obtained sensorgrams using a 1:1 binding model, in the BiaEvaluation software 4.1 (GE Healthcare).

[0314] In vitro IL-16 neutralization assay: The TF-1 cell line proliferates in response to many different cytokines including IL-1B. This cell line was used to assess the ability of primary IL-1R1 binders to inhibit IL-1B actions. TF-1 cells were maintained in RPMI1640 with L-glutamine (Lonza) supplemented with 10% FCS (Gibco), Penicillin-Streptomycin (Lonza) and 2 ng/ml rhGM-CSF (R&D Systems). Prior to use, cells were washed twice in RPMI1640 without rhGM-CSF. Cells were then counted and dispensed into 96 well flat bottomed plates at a density of 3×10⁴ cells per well. In separate plates, serial dilutions of the inhibitory binders; His₆-tagged IL-1R-I binding Z variants, with a concentration range of 400-0.1 nM, or the IL-1R-I binding protein Kineret (anakinra, Sobi), with a concentration range of 0.3-0.0003 nM, were incubated in the presence of 0.6 nM IL-1B (PeproTech). The pre-mixed complexes of the Z variant polypeptides and IL-1B were transferred to wells containing TF-1 cells. The cells were stimulated for 72 h at 37° C. in a humidified 5% CO₂ atmosphere. During the last four hours of incubation, 19 μl of 2×diluted CCK-8 (Fluka, Sigma Aldrich), was added per well to determine the proliferative responses. The absorbance was measured at 450 nm using a microplate reader (Victor³, Perkin Elmer). The data on cell growth was assessed by non-linear regression to a four-parameter dose-response curve, and the half maximal inhibitory concentration (IC₅₀) was determined using GraphPadPrism program.

[0315] Circular dichroism (CD) spectroscopy analysis: Purified His₆-tagged Z variants were diluted to 0.5 mg/ml in PBS. For each diluted Z variant, a CD spectrum at 250-195 nm was obtained at 20° C. In addition, a variable temperature measurement (VTM) was performed to determine the melting temperature (Tm). In the VTM, the absorbance was measured at 221 nm while the temperature was raised from 20 to 90° C., with a temperature slope of 5° C./min. A new CD spectrum was obtained at 20° C. after the heating procedure in order to study the refolding ability of the Z variants. The CD measurements were performed on a Jasco J-810 spectropolarimeter (Jasco Scandinavia AB) using a cell with an optical path length of 1 mm.

### Results

[0316] Production of His-tagged Z variants: The IL-1R-I binding Z variants with a His₆ tag were expressed as soluble gene products in E. coli. The amount of purified protein from approximately 1-2 g bacterial pellet was determined spectrophotometrically by measuring the absorbance at 280 nm and ranged from approximately 3 to 25 mg for the different IL-1R-I binding Z variants before RPC purification. SDS-PAGE analysis of each final protein preparation showed that these predominantly contained the IL-1R-I binding Z variant. The correct identity and molecular weight of each Z variant were confirmed by HPLC-MS analysis.

[0317] Biacore affinity analysis: The interactions of His₆-tagged IL-1R-I-binding Z variants with human and cynomolgus IL-1R-I were analyzed in a Biacore instrument by injecting two concentrations of each Z variant over surfaces containing immobilized IL-1R-I. The calculated affinities (K_{D}) for human IL-1R-I are presented in Table 4. The strongest binder to human IL-1R-I (Z12967, SEQ ID NO:9) bound to human IL-1R-I with an affinity of 1.2×10.9 M and to cynomolgus IL-1R-I with an affinity of 3.5×10⁸ M.

TABLE 4
Affinities for His₆-Z polypeptides binding to IL-1R-I.

| Z variant | SEQ ID NO | Human IL-1R-I K_{D} (M) |
|---|---|---|
| Z12884 | 13 | 1.8 × 10⁻⁸ |
| Z12895 | 12 | 5.5 × 10⁻⁹ |
| Z12911 | 18 | 7.1 × 10⁻⁹ |
| Z12917 | 15 | 8.0 × 10⁻⁹ |
| Z12922 | 3 | 9.8 × 10⁻⁹ |
| Z12967 | 9 | 1.2 × 10⁻⁹ |
| Z12974 | 8 | 1.5 × 10⁻⁸ |
| Z12975 | 6 | 8.9 × 10⁻⁸ |

[0318] In vitro IL-1B neutralization assay: The IL-1B inhibition ability of His₆-tagged IL-1R-I-binding Z variants was analyzed in a TF-1 cell assay. The resulting IC₅₀ values are presented in Table 5.

TABLE 5
IC₅₀ values for His₆-Z polypeptides from a TF-1 cell assay.

| Z variant | SEQ ID NO | IC₅₀ (nM) |
|---|---|---|
| Z12884 | 13 | 27 |
| Z12895 | 12 | 7.1 |
| Z12911 | 18 | 30 |
| Z12917 | 15 | 11 |
| Z12922 | 3 | 66 |
| Z12967 | 9 | 1.1 |
| Z12974 | 8 | 60 |
| Z12975 | 6 | 35 |
| Kineret | — | 0.05 |

[0319] CD analysis: The CD spectra determined for the IL-1R-I binding Z variants with a Hiss tag showed that each had an α-helical structure at 20° C. This result was also verified in the variable temperature measurements, wherein the melting temperatures were determined (Table 6). Reversible folding was seen for all the IL-1R-I binding Z variants when overlaying spectra measured before and after heating to 90° C.

TABLE 6
Melting temperatures (Tm).

| Z variant | SEQ ID NO | Tm (° C.) |
|---|---|---|
| Z12911 | 18 | 64 |
| Z12967 | 9 | 58 |
| Z12922 | 3 | 47 |
| Z12974 | 8 | 49 |
| Z12975 | 6 | 51 |
| Z12884 | 13 | 49 |
| Z12917 | 15 | 56 |
| Z12895 | 12 | 55 |

### Example 3

### Design and Construction of a First Matured Library of IL-1R-I Binding Z Variants

[0320] In this Example, a matured library was constructed. The library was used for selection of further IL-1R-I binding Z variants. Selections from matured libraries are usually expected to result in binders with increased affinity (Orlova et al., (2006) Cancer Res 66 (8): 4339-48).

[0321] Materials and methods Library design: The library was primarily based on human IL-1R-I binding Z variants from the primary selection described in Example 1 and 2. Sequences of a subset of the Z variants derived from the primary selection are listed in FIGS. 1A-1BK and in the sequence listing as SEQ ID NO:1-19. In the new library, denoted Zlib006IL-1RI.I, ten variable positions in the Z molecule scaffold were biased towards certain amino acid residues, and three positions were kept constant. Two oligonucleotides, generated by the TRIM technology, which enables incorporation of randomized sets of trinucleotide building blocks, were ordered from Ella Biotech (Martinsried, Germany). The oligonucleotides represented helix 1 and helix 2 of the Z molecule, respectively, and contained an annealing region of 18 overlapping nucleotides. The assembled double stranded DNA sequence was: 5′-AA ATA AAT CTC GAG GTA GAT GCC AAA TAC GCC AAA GAA NNN NNN NNN GCG NNN NNN GAG ATC NNN NNN CTG CCT AAC CTC ACC NNN NNN CAA NNN NNN GCC TTC ATC NNN AAA TTA NNN GAT GAC CCA AGC CAG AGC TCA TTA TTT A-3′ (SEQ ID NO:1680; designed codons are denoted NNN). The sequence encodes a partially randomized helix 1 and 2 of the Z variant amino acid sequence flanked by the restriction sites Xhol and Sacl. The design for each amino acid residue of the new library, including ten variable amino acid positions (9, 10, 11, 13, 14, 17, 18, 25, 32 and 35) and three constant amino acid positions (24, 27 and 28) in the Z molecule scaffold, are displayed in Table 7. The resulting theoretical library size was 9.7×10⁸ variants. An even theoretical distribution of the different amino acids was applied within each amino acid position, except from position 9, 13, 17, 18, 32 and 35, where a higher portion of selected amino acids was applied.

TABLE 7
Design of first maturation library Zlib006IL-1RI.I.

| Amino acid | Amino acid randomization | No. of |
|---|---|---|
| position in the | (percentage when uneven | different |
| Z variant molecule | distribution) | amino acids |
| 9 | A(30%), E, F, H, I, K, L, Q, R, S, | 14 |
| | T, V, W, Y | |
| 10 | A, D, E, F, H, I, K, L, Q, R, S, T, | 15 |
| | V, W, Y | |
| 11 | A, D, E, F, H, I, K, L, N, Q, R, S, | 16 |
| | T, V, W, Y | |
| 13 | A, F, H, I, L, Q(20%), S, T, V, W, | 11 |
| | Y(20%) | |
| 14 | A, D, E, F, H, I, K, L, M, Q, R, S, | 16 |
| | T, V, W, Y | |
| 17 | F, W(20%), Y | 3 |
| 18 | A(11%), D, E, F, G, H, I, K, L, N, | 17 |
| | Q, R, S, T, V, W, Y | |
| 24 | R | 1 |
| 25 | H, K, R, S | 4 |
| 27 | Y | 1 |
| 28 | T | 1 |
| 32 | A, I, L, R(70%) | 4 |
| 35 | F(80%), L(20%) | 2 |

[0322] Library construction: The two oligonucleotides were assembled, amplified, cloned into vector pAY02592, and transformed into E. coli ER2738, essentially as described for matured libraries in WO 2015/189430. Clones from the Zlib006IL-1RI.I library were sequenced (as described in WO 2009/077175) in order to verify the content and to evaluate the outcome of the constructed library vis-à-vis the library design.

[0323] Preparation of phage stock: A phage stock containing the phagemid library was prepared in shake flasks in two batches. Cells from a glycerol stock containing the phagemid library were inoculated in 2 and 3 I, respectively, of TSB-YE medium, supplemented with 2% glucose, 10 μg/ml tetracycline and 100 μg/ml ampicillin. The cultivations were grown at 37° C. until OD₆₀₀ reached log-phase 0.5-0.9. The cultivations were infected using a 4-10×molar excess of M13K07 helper phage and were incubated for 30 minutes at 37° C. Batch 1 cultivations were pelleted by centrifugation, dissolved in TSB-YE medium, supplemented with 100 μg/ml ampicillin, 25 μg/ml kanamycin and 0.1 mM IPTG and grown at 30° C. overnight. To batch 2 cultivation, 0.1 mM IPTG was added, followed by an incubation of 1 h at 37° C. After addition of 25 μg/ml kanamycin, the cultures were grown at 30° C. overnight. For both batches, the overnight grown cells were pelleted by centrifugation at 4,000 g and the phage particles remaining in the medium were thereafter precipitated twice in PEG/NaCl, filtered and dissolved in PBS and glycerol as described in Grönwall et al., supra. Phage stocks were stored at −80° C. until use in selection.

### Results

[0324] Library construction: The new library Zlib006IL-1RI.I was designed based on a set of IL-1R-I binding Z variants with verified binding properties (Example 1 and 2). The theoretical size of the designed library was 9.7×10⁸ Z variants. The actual size of the library, determined by titration after transformation to E. coli ER2738 cells, was 5.6×10⁹ transformants. The library quality was tested by sequencing 192 transformants and by comparing their actual sequences with the theoretical design. The contents of the actual library compared to the designed library were shown to be satisfactory. A first matured library of potential binders to IL-1R-I was thus successfully constructed.

### Example 4

Selection and Screening of Z Variants from the First Matured Library

[0325] In this Example, human and cynomolgus IL-1R-I were used as target proteins in phage display selections using a matured phage library of Z variants. The DNA of selected clones was sequenced, the Z variants were produced in E. coli periplasmic fractions and assayed against IL-1R-I in ELISA and Biacore.

### Materials and Methods

[0326] Expression of target protein: Expression of Fc fused cynomolgus IL-1R-I (cIL-1R-I-Fc, SEQ ID NO:1666) was performed using the Expi293 expression system (Thermo Fisher Scientific), essentially according to the manufacturer's protocol. Supernatants were harvested by centrifugation 7 days after transfection of expression vectors and stored at −70° C. The frozen supernatant from the Expi293 culture were thawed and filtrated (0.22 μm). The supernatant containing the cIL-1R-I-Fc was purified using affinity chromatography with a MabSelect SuRe column. The purified protein was buffer exchanged to PBS. The purity of the protein was analyzed by SDS-PAGE stained with Coomassie Blue and the molecular weight was analyzed using mass spectrometry (HPLC/MS or MALDI-TOF/MS).

[0327] Phage display selection of IL-1R-I binding Z variants: The biotinylated human target proteins b-hIL-1R-I-Fc and b-hIL-1R-I, and the cynomolgus target proteins cIL-1R-I-Fc (SEQ ID NO:1666) and b-cIL-1R-I-Fc (cIL-1RI-Fc biotinylated as hIL-1R-I-Fc in Example 1), were used in phage selections using the new library of Z variant molecules described in Example 3. An overview of the selection strategy, describing the parallel selection tracks and an overall increased stringency in the selection cycles obtained by using a lowered target concentration and an increased number of washes, is shown in Table 8. The selections were performed in four to five cycles essentially as described in Example 1, with the following exceptions 1-6. Exception 1: pre-selection was performed for >60 min at RT by incubation of phage stocks with Fc/SA beads (selection tracks 1-1, 1-2, 1-4, 1-6, 1-8, 2-14 and 2-16), SA beads (selection tracks 1-3, 1-7, 1-9, 2-15 and 2-17) or Fc/protein A beads (selection track 1-5), respectively. Exception 2: the time for selection was 30-100 min as presented for each track in Table 8 Exception 3: target-phage complexes were captured on beads using the following amount of target protein and beads: 8 μg b-hIL-1R-I-Fc, 1 μg b-hIL-1R-I or 4 μg cIL-1R-I-Fc per mg SA beads, respectively, and 5 μg cIL-1R-I-Fc per mg protein A beads. In selection round 5, 2 mg SPHERO neutravidin beads (Spherotech cat. no. NVM-20-5) were used for target-phage complex capture. Exception 4: in the second final wash step of tracks 2-14, 2-15, 2-17, 3-14, 3-15 and 3-17, respectively, hIL-1R-I was added to the wash buffer in 100 times higher concentration than the target concentration of the respective track and the wash was run for 15-20 min. Exception 5: the phage/target/bead complexes of selection tracks 4-1 to 4-13 were divided into two after the bead wash procedure. Half of the samples was submitted to elution and the other half, denoted 4-1× to 4-13×, was submitted to an extra 66 h, wash step before elution. Exception 6: two selection rounds four tracks, 4-4× and 4-6×, were submitted to a fifth selection round, resulting in tracks 5-1 and 5-2, as presented in Table 8. E. coli XL-1 Blue cells (Agilent Technologies, cat. no. 200268), grown in medium supplemented with 10 μg/ml tetracycline, were used for phage infection and a 10×excess of M13K07 helper phage compared to bacteria was allowed to infect log phase bacteria. Amplification of phage particles after round 1 to 3 was performed essentially as described for round 2 and 3 in Example 1.

TABLE 8
Overview of selections from the first matured library.

| | | Phage stock | | Target | | Number |
|---|---|---|---|---|---|---|
| | Selection | from library or | | concentration | Selection | of |
| Cycle | track | selection track | Target | (nM) | time (min) | washes |
| 1 | 1-1 | Zlib006IL-1RI.I | b-hIL-1R-I-Fc | 50 | 70 | 4 |
| 1 | 1-2 | Zlib006IL-1RI.I | b-hIL-1R-I-Fc | 10 | 70 | 4 |
| 1 | 1-3 | Zlib006IL-1RI.I | b-hIL-1R-I | 50 | 70 | 4 |
| 1 | 1-4 | Zlib006IL-1RI.I | b-cIL-1R-I-Fc | 100 | 70 | 2 |
| 1 | 1-5 | Zlib006IL-1RI.I | cIL-1R-I-Fc | 100 | 70 | 2 |
| 1 | 1-6 | Zlib006IL-1RI.I | b-hIL-1R-I-Fc | 10 | 45 | 5 |
| 1 | 1-7 | Zlib006IL-1RI.I | b-hIL-1R-I | 10 | 45 | 5 |
| 1 | 1-8 | Zlib006IL-1RI.I | b-hIL-1R-I-Fc | 10 | 45 | 5 |
| 1 | 1-9 | Zlib006IL-1RI.I | b-hIL-1R-I | 10 | 45 | 5 |
| 2 | 2-1 | 1-1 | b-hIL-1R-I-Fc | 20 | 60 | 6 |
| 2 | 2-2 | 1-1 | b-hIL-1R-I-Fc | 5 | 60 | 6 |
| 2 | 2-3 | 1-2 | b-hIL-1R-I-Fc | 4 | 60 | 8 |
| 2 | 2-4 | 1-2 | b-hIL-1R-I-Fc | 4 | 60 | 12 |
| 2 | 2-5 | 1-3 | b-hIL-1R-I | 20 | 60 | 6 |
| 2 | 2-6 | 1-3 | b-hIL-1R-I | 10 | 60 | 6 |
| 2 | 2-7 | 1-3 | b-hIL-1R-I | 10 | 60 | 10 |
| 2 | 2-8 | 1-4 | b-cIL-1R-I-Fc | 50 | 60 | 4 |
| 2 | 2-9 | 1-5 | cIL-1R-I-Fc | 50 | 60 | 4 |
| 2 | 2-10 | 1-1 | b-cIL-1R-I-Fc | 100 | 60 | 2 |
| 2 | 2-11 | 1-1 | b-cIL-1R-I-Fc | 50 | 60 | 6 |
| 2 | 2-12 | 1-1 | cIL-1R-I-Fc | 100 | 60 | 2 |
| 2 | 2-13 | 1-1 | cIL-1R-I-Fc | 50 | 60 | 6 |
| 2 | 2-14 | 1-8 | b-hIL-1R-I-Fc | 2 | 30 | 10* |
| 2 | 2-15 | 1-9 | b-hIL-1R-I | 2 | 30 | 10* |
| 2 | 2-16 | 1-9 | b-cIL-1R-I-Fc | 25 | 30 | 3 |
| 2 | 2-17 | 1-6/1-7 pool | b-hIL-1R-I | 2 | 30 | 10* |
| 3 | 3-1 | 2-1 | b-hIL-1R-I-Fc | 5 | 60 | 8 |
| 3 | 3-2 | 2-2 | b-hIL-1R-I-Fc | 0.5 | 60 | 8 |
| 3 | 3-3 | 2-3 | b-hIL-1R-I-Fc | 1 | 60 | 12 |
| 3 | 3-4 | 2-4 | b-hIL-1R-I-Fc | 1 | 60 | 24 |
| 3 | 3-5 | 2-5 | b-hIL-1R-I | 5 | 60 | 8 |
| 3 | 3-6 | 2-6 | b-hIL-1R-I | 1 | 60 | 8 |
| 3 | 3-7 | 2-7 | b-hIL-1R-I | 2 | 60 | 20 |
| 3 | 3-8 | 2-8 | b-cIL-1R-I-Fc | 25 | 60 | 6 |
| 3 | 3-9 | 2-9 | cIL-1R-I-Fc | 25 | 60 | 6 |
| 3 | 3-10 | 2-10 | b-hIL-1R-I-Fc | 25 | 60 | 6 |
| 3 | 3-11 | 2-11 | b-hIL-1R-I-Fc | 5 | 60 | 8 |
| 3 | 3-12 | 2-12 | b-hIL-1R-I-Fc | 25 | 60 | 6 |
| 3 | 3-13 | 2-13 | b-hIL-1R-I-Fc | 5 | 60 | 8 |
| 3 | 3-14 | 2-14 | b-hIL-1R-I-Fc | 0.5 | 40 | 16* |
| 3 | 3-15 | 2-15 | b-hIL-1R-I | 0.5 | 40 | 16* |
| 3 | 3-16 | 2-16 | b-hIL-1R-I | 2 | 40 | 9 |
| 3 | 3-17 | 2-17 | b-hIL-1R-I | 0.4 | 40 | 16* |
| 4 | 4-1 | 3-1 | b-hIL-1R-I-Fc | 1 | 40 | 10** |
| 4 | 4-2 | 3-2 | b-hIL-1R-I-Fc | 0.05 | 40 | 10** |
| 4 | 4-3 | 3-3 | b-hIL-1R-I-Fc | 0.2 | 40 | 16** |
| 4 | 4-4 | 3-4 | b-hIL-1R-I-Fc | 0.2 | 40 | 36** |
| 4 | 4-5 | 3-5 | b-hIL-1R-I | 1 | 40 | 10** |
| 4 | 4-6 | 3-6 | b-hIL-1R-I | 0.1 | 40 | 10** |
| 4 | 4-7 | 3-7 | b-hIL-1R-I | 0.4 | 40 | 30** |
| 4 | 4-8 | 3-8 | b-cIL-1R-I-Fc | 12.5 | 40 | 8** |
| 4 | 4-9 | 3-9 | cIL-1R-I-Fc | 50 | 40 | 8** |
| 4 | 4-10 | 3-10 | b-cIL-1R-I-Fc | 50 | 40 | 6** |
| 4 | 4-11 | 3-11 | b-cIL-1R-I-Fc | 10 | 40 | 12** |
| 4 | 4-12 | 3-12 | cIL-1R-I-Fc | 50 | 40 | 6** |
| 4 | 4-13 | 3-13 | cIL-1R-I-Fc | 10 | 40 | 12** |
| 4 | 4-14 | 3-14 | b-hIL-1R-I-Fc | 0.1 | 40 | 20 |
| 4 | 4-15 | 3-15 | b-hIL-1R-I | 0.1 | 40 | 20 |
| 4 | 4-16 | 3-16 | b-cIL-1R-I-Fc | 5 | 40 | 16 |
| 4 | 4-17 | 3-17 | b-hIL-1R-I | 0.2 | 40 | 16 |
| 5 | 5-1 | 4-4x | b-hIL-1R-I-Fc | 50 | 100 | 3 |
| 5 | 5-2 | 4-6x | b-hIL-1R-I | 50 | 100 | 3 |

*Addition of hlL-1R-I in the second final wash step.
**Selection track divided into two after washes. One part submitted to an extra wash, over the weekend, before elution.

[0328] In the first selection cycle, nine selection tracks were run; 1-1 to 1-9. In cycle two, some tracks were divided into two, three or six tracks and two tracks were pooled into one track, resulting in a total of 17 parallel tracks in cycle 2, 3 and 4; 2-1 to 2-17, 3-1 to 3-17 and 4-1 to 4-17, respectively. In cycle 5, two tracks were run; 5-1 and 5-2. In selection tracks 1-1 to 1-5, batch 1 of Zlib006IL-1RI.I was used, and in 1-6 to 1-9, batch 2 was used, respectively. All selection tracks are presented in Table 8. The number of phage particles used for selections was typically more than 2,000 times the number of eluted phage particles in the previous cycle.

[0329] Sequencing: Individual clones from cycle 4 or 5 of the different selection tracks were picked for sequencing. Amplification and sequence analysis of gene fragments were performed essentially as described in Example 1.

[0330] Production of Z variants for ELISA and Biacore screening: Z variants were produced essentially as described in Example 1 with the exception that the culture volume was 1.2 ml and that the periplasmic extracts were clarified by filtration using 1.2 μm 96 well filter plates (MerckMillipore cat. no. MSANLY50) after the freeze-thawing procedure. Z variants screened in Biacore were diluted five times in HBS-EP buffer.

[0331] ELISA screening of Z variants: The binding of Z variants to human was analyzed in ELISA, essentially as described in Example 1, using 0.3 nM hIL-1R-I-Fc as target protein. As blank control, PBST 0.05% was added instead of the Z-ABD periplasmic extract.

[0332] EC₅₀ analysis of Z variants: A selection of IL-1R-I binding Z variants was subjected to an analysis of response against a dilution series of hIL-1R-I-Fc using ELISA as described above. The target protein hIL-1R-I-Fc was diluted stepwise 1:10 from 100 to 0.01 nM. As a background control, the Z variants were assayed with no target protein added. Obtained data was analyzed using GraphPad Prism 5 and non-linear regression, and the EC₅₀ values (the half maximal effective concentration) were calculated. A periplasmic extract with Z12967 (SEQ ID NO:9) was analyzed in parallel for signal comparison.

[0333] Biacore screening of Z variants: The binding of Z variants to human IL-1R-I was analyzed in a kinetic screening using a Biacore T200 instrument. A polyclonal goat anti-ABD antibody (goat anti-ABD) was immobilized on CM5 chip surfaces basically as described for other proteins in Example 2. For the kinetic screening, analytes were injected in two steps. First, a Z-ABD (ABD001, SEQ ID NO:1660) periplasmic extract was injected over the surface at 5 μl/min for 1 min. As a second step, 100 nM hIL-1R-I was injected at 30 μl/min for 2 min, followed by 2 min of dissociation in running buffer HBS-EP. Glycine-HCl pH 2.0 (cat. no. BR100355, GE Healthcare) was used for regeneration of the antibody surfaces between the cycles. The temperature of the assay was 25° C. Before performing the kinetic analyses, the signal from 100 nM hIL-1R-I injected over a reference surface containing goat anti-ABD but no Z-ABD sample was subtracted from the sensorgram of Z-ABD binding to hIL-1R-I. Rough screening affinities (K_{D}) were calculated from the reference subtracted 100 nM hIL-1R-I response using a 1:1 binding model of the BiaEvaluation software 4.1 (GE Healthcare). A periplasmic extract of Z12967 was included in the screening analysis for comparison. Periplasmic extracts of four Z variants were also submitted to a single cycle kinetics (SCK) assay, using the same setup as above, but injecting five hIL-1R-I concentrations and evaluating the data with a 1:1 model for single cycle kinetics.

### Results

[0334] Phage display selection of IL-1R-I binding Z variants: Individual clones were obtained after four or five cycles of phage display selections against human and cynomolgus IL-1R-I.

[0335] Sequencing: Sequencing was performed for clones obtained after four or five cycles of selection. Each variant was given a unique identification number #####, and individual variants are referred to as Z#####. The amino acid sequences of the 58 amino acid residues long Z variants are listed in FIGS. 1A-1BK and in the sequence listing as SEQ ID NO:20-1209. The deduced IL-1R-I binding motifs extend from residue 8 to residue 36 in each sequence. The amino acid sequences of the 49 amino acid residues long polypeptides predicted to constitute the complete three-helix bundle within each of these Z variants extend from residue 7 to residue 55. It was observed that in one sequenced Z variant (Z18557, SEQ ID NO:1205) a valine residue was present in position 12.

[0336] ELISA screening of Z variants: Clones obtained after four or five cycles of selection were produced individually in 96-well plates and were screened for human IL-1R-I binding activity in ELISA. 98% of the assayed Z variants gave a positive signal of 2× the blank control or higher against 0.3 nM hIL-1R-I-Fc.

[0337] EC₅₀ analysis of Z variants: A subset of 115 Z variants displaying results over 0.99 AU (16.5× the blank control) was subjected to ELISA target titration using hIL-1R-I-Fc. Obtained results were used for calculation of EC₅₀ values (Table 9). The result for Z12967 (SEQ ID NO:9) was 2.4×10⁻¹⁰ M.

TABLE 9
Calculated EC₅₀ values from ELISA titration analysis.

| | SEQ ID | |
|---|---|---|
| Z variant | NO | EC₅₀ (M) |
| Z15811 | 21 | 2.5 × 10⁻¹⁰ |
| Z15813 | 23 | 3.5 × 10⁻¹⁰ |
| Z15824 | 34 | 2.3 × 10⁻¹⁰ |
| Z15840 | 49 | 2.5 × 10⁻¹⁰ |
| Z15862 | 71 | 2.1 × 10⁻¹⁰ |
| Z15876 | 1206 | 4.2 × 10⁻¹⁰ |
| Z15886 | 94 | 2.6 × 10⁻¹⁰ |
| Z15897 | 105 | 2.5 × 10⁻¹⁰ |
| Z15923 | 131 | 2.4 × 10⁻¹⁰ |
| Z15927 | 135 | 2.2 × 10⁻¹⁰ |
| Z15929 | 137 | 2.4 × 10⁻¹⁰ |
| Z15932 | 1207 | 2.3 × 10⁻¹⁰ |
| Z15949 | 154 | 2.5 × 10⁻¹⁰ |
| Z15953 | 158 | 2.1 × 10⁻¹⁰ |
| Z15960 | 165 | 2.3 × 10⁻¹⁰ |
| Z15961 | 166 | 2.1 × 10⁻¹⁰ |
| Z15975 | 1209 | 2.4 × 10⁻¹⁰ |
| Z15978 | 182 | 4.8 × 10⁻¹⁰ |
| Z15987 | 191 | 2.3 × 10⁻¹⁰ |
| Z15996 | 200 | 2.5 × 10⁻¹⁰ |
| Z15997 | 201 | 2.5 × 10⁻¹⁰ |
| Z15999 | 203 | 2.4 × 10⁻¹⁰ |
| Z16000 | 204 | 2.4 × 10⁻¹⁰ |
| Z16003 | 207 | 2.8 × 10⁻¹⁰ |
| Z16004 | 208 | 2.5 × 10⁻¹⁰ |
| Z16007 | 211 | 2.2 × 10⁻¹⁰ |
| Z16008 | 212 | 2.3 × 10⁻¹⁰ |
| Z16011 | 215 | 2.2 × 10⁻¹⁰ |
| Z16023 | 227 | 2.1 × 10⁻¹⁰ |
| Z16034 | 238 | 2.3 × 10⁻¹⁰ |
| Z16041 | 245 | 2.4 × 10⁻¹⁰ |
| Z16042 | 246 | 2.4 × 10⁻¹⁰ |
| Z16043 | 247 | 2.3 × 10⁻¹⁰ |
| Z16046 | 250 | 2.7 × 10⁻¹⁰ |
| Z16048 | 252 | 2.5 × 10⁻¹⁰ |
| Z16049 | 253 | 2.4 × 10⁻¹⁰ |
| Z16050 | 254 | 2.3 × 10⁻¹⁰ |
| Z16051 | 255 | 2.5 × 10⁻¹⁰ |
| Z16053 | 257 | 2.5 × 10⁻¹⁰ |
| Z16054 | 258 | 2.4 × 10⁻¹⁰ |
| Z16058 | 262 | 2.3 × 10⁻¹⁰ |
| Z16070 | 273 | 2.3 × 10⁻¹⁰ |
| Z16072 | 275 | 2.2 × 10⁻¹⁰ |
| Z16084 | 287 | 2.2 × 10⁻¹⁰ |
| Z16089 | 291 | 2.4 × 10⁻¹⁰ |
| Z16092 | 293 | 2.4 × 10⁻¹⁰ |
| Z16093 | 294 | 2.1 × 10⁻¹⁰ |
| Z16097 | 298 | 2.0 × 10⁻¹⁰ |
| Z16102 | 302 | 2.8 × 10⁻¹⁰ |
| Z16106 | 306 | 2.3 × 10⁻¹⁰ |
| Z16116 | 316 | 2.1 × 10⁻¹⁰ |
| Z16117 | 317 | 2.1 × 10⁻¹⁰ |
| Z16121 | 321 | 2.3 × 10⁻¹⁰ |
| Z16122 | 322 | 2.9 × 10⁻¹⁰ |
| Z16127 | 325 | 2.1 × 10⁻¹⁰ |
| Z16135 | 333 | 2.5 × 10⁻¹⁰ |
| Z16141 | 339 | 2.8 × 10⁻¹⁰ |
| Z16143 | 341 | 2.1 × 10⁻¹⁰ |
| Z16155 | 351 | 2.9 × 10⁻¹⁰ |
| Z16156 | 352 | 2.4 × 10⁻¹⁰ |
| Z16161 | 357 | 2.5 × 10⁻¹⁰ |
| Z16162 | 358 | 2.7 × 10⁻¹⁰ |
| Z16163 | 359 | 1.7 × 10⁻¹⁰ |
| Z16164 | 360 | 6.8 × 10⁻¹⁰ |
| Z16165 | 361 | 2.2 × 10⁻¹⁰ |
| Z16168 | 364 | 2.8 × 10⁻¹⁰ |
| Z16169 | 365 | 1.8 × 10⁻¹⁰ |
| Z16173 | 369 | 3.6 × 10⁻¹⁰ |
| Z16178 | 374 | 2.4 × 10⁻¹⁰ |
| Z16206 | 402 | 4.5 × 10⁻¹⁰ |
| Z16207 | 403 | 2.2 × 10⁻¹⁰ |
| Z16219 | 415 | 2.4 × 10⁻¹⁰ |
| Z16234 | 429 | 5.4 × 10⁻¹⁰ |
| Z16236 | 431 | 2.4 × 10⁻¹⁰ |
| Z16241 | 436 | 4.9 × 10⁻¹⁰ |
| Z16243 | 438 | 2.2 × 10⁻¹⁰ |
| Z16245 | 440 | 2.2 × 10⁻¹⁰ |
| Z16246 | 441 | 3.9 × 10⁻¹⁰ |
| Z16255 | 449 | 1.7 × 10⁻¹⁰ |
| Z16263 | 457 | 2.6 × 10⁻¹⁰ |
| Z16264 | 458 | 3.0 × 10⁻¹⁰ |
| Z16277 | 470 | 2.6 × 10⁻¹⁰ |
| Z16301 | 494 | 2.2 × 10⁻¹⁰ |
| Z16302 | 495 | 2.8 × 10⁻¹⁰ |
| Z16305 | 498 | 2.2 × 10⁻¹⁰ |
| Z16312 | 504 | 2.4 × 10⁻¹⁰ |
| Z16319 | 511 | 3.0 × 10⁻¹⁰ |
| Z16321 | 513 | 2.7 × 10⁻¹⁰ |
| Z16329 | 519 | 4.5 × 10⁻¹⁰ |
| Z16341 | 531 | 1.7 × 10⁻¹⁰ |
| Z16363 | 550 | 2.0 × 10⁻¹⁰ |
| Z16377 | 562 | 2.1 × 10⁻¹⁰ |
| Z16378 | 563 | 2.0 × 10⁻¹⁰ |
| Z16388 | 573 | 2.9 × 10⁻¹⁰ |
| Z16405 | 590 | 3.6 × 10⁻¹⁰ |
| Z16678 | 853 | 2.4 × 10⁻¹⁰ |
| Z16681 | 856 | 2.3 × 10⁻¹⁰ |
| Z16688 | 863 | 2.7 × 10⁻¹⁰ |
| Z16749 | 921 | 2.7 × 10⁻¹⁰ |
| Z16771 | 943 | 2.4 × 10⁻¹⁰ |
| Z17244 | 1147 | 4.2 × 10⁻¹⁰ |
| Z17255 | 1158 | 2.5 × 10⁻¹⁰ |
| Z17257 | 1160 | 4.8 × 10⁻¹⁰ |
| Z17269 | 1171 | 2.7 × 10⁻¹⁰ |
| Z17270 | 1172 | 3.0 × 10⁻¹⁰ |
| Z17274 | 1176 | 2.1 × 10⁻¹⁰ |
| Z17278 | 1180 | 2.7 × 10⁻¹⁰ |
| Z17279 | 1181 | 2.8 × 10⁻¹⁰ |
| Z17280 | 1182 | 2.2 × 10⁻¹⁰ |
| Z17288 | 1190 | 4.2 × 10⁻¹⁰ |
| Z17292 | 1194 | 2.0 × 10⁻¹⁰ |
| Z17296 | 1198 | 3.2 × 10⁻¹⁰ |
| Z17297 | 1199 | 2.4 × 10⁻¹⁰ |
| Z18557 | 1205 | 1.9 × 10⁻¹⁰ |

[0338] On average, the Z variants originating from this library (first matured library) displayed an improvement in EC₅₀ values by a factor 10 compared with the average EC₅₀ for the Z variants originating from the primary selection. Biacore screening of Z variants: A selection of IL-1R-I binding Z variants was submitted to a Biacore kinetic screening. A single concentration of hIL-1R-I was injected over each Z-ABD captured from periplasmic extracts on a sensor chip surface containing an anti-ABD antibody. The calculated screening affinities are presented in Table 10. Z16062 (SEQ ID NO:266) got the best K_{D} value (7.6×10 9 M) of the assayed binders. The K_{D} of Z12967 was 2.5×10⁻⁸ M. The four binders assayed in a SCK experiment got K_{D} values that deviated from their respective screening kinetics affinities by 0-14%.

TABLE 10
Calculated K_{D} values from Biacore kinetic screening.

| | SEQ ID | |
|---|---|---|
| Z variant | NO | K_{D} (M) |
| Z15824 | 34 | 9.2 × 10⁻⁹ |
| Z15840 | 49 | 1.1 × 10⁻⁸ |
| Z15864 | 73 | 1.6 × 10⁻⁸ |
| Z15873 | 82 | 2.3 × 10⁻⁸ |
| Z15876 | 1206 | 8.3 × 10⁻⁹ |
| Z15882 | 90 | 9.0 × 10⁻⁹ |
| Z15889 | 97 | 1.5 × 10⁻⁸ |
| Z15897 | 105 | 1.2 × 10⁻⁸ |
| Z15908 | 116 | 1.7 × 10⁻⁸ |
| Z15947 | 152 | 1.1 × 10⁻⁸ |
| Z15953 | 158 | 1.1 × 10⁻⁸ |
| Z15972 | 177 | 1.2 × 10⁻⁸ |
| Z15986 | 190 | 9.5 × 10⁻⁹ |
| Z16009 | 213 | 2.0 × 10⁻⁸ |
| Z16010 | 214 | 1.2 × 10⁻⁸ |
| Z16011 | 215 | 1.1 × 10⁻⁸ |
| Z16012 | 216 | 1.2 × 10⁻⁸ |
| Z16013 | 217 | 1.8 × 10⁻⁸ |
| Z16014 | 218 | 1.1 × 10⁻⁸ |
| Z16015 | 219 | 1.5 × 10⁻⁸ |
| Z16016 | 220 | 1.2 × 10⁻⁸ |
| Z16017 | 221 | 1.8 × 10⁻⁸ |
| Z16018 | 220 | 1.6 × 10⁻⁸ |
| Z16019 | 223 | 1.5 × 10⁻⁸ |
| Z16020 | 224 | 2.0 × 10⁻⁸ |
| Z16021 | 225 | 9.6 × 10⁻⁹ |
| Z16022 | 226 | 1.5 × 10⁻⁸ |
| Z16023 | 227 | 9.2 × 10⁻⁹ |
| Z16024 | 228 | 1.4 × 10⁻⁸ |
| Z16025 | 229 | 1.9 × 10⁻⁸ |
| Z16026 | 230 | 1.6 × 10⁻⁸ |
| Z16027 | 231 | 1.4 × 10⁻⁸ |
| Z16028 | 232 | 1.9 × 10⁻⁸ |
| Z16029 | 233 | 2.1 × 10⁻⁸ |
| Z16030 | 234 | 1.7 × 10⁻⁸ |
| Z16031 | 235 | 2.0 × 10⁻⁸ |
| Z16032 | 236 | 2.6 × 10⁻⁸ |
| Z16033 | 237 | 1.9 × 10⁻⁸ |
| Z16034 | 238 | 9.1 × 10⁻⁹ |
| Z16035 | 239 | 1.7 × 10⁻⁸ |
| Z16036 | 240 | 1.1 × 10⁻⁸ |
| Z16037 | 241 | 1.4 × 10⁻⁸ |
| Z16038 | 242 | 8.9 × 10⁻⁹ |
| Z16039 | 243 | 1.4 × 10⁻⁸ |
| Z16040 | 244 | 2.0 × 10⁻⁸ |
| Z16041 | 245 | 1.0 × 10⁻⁸ |
| Z16042 | 246 | 9.7 × 10⁻⁹ |
| Z16043 | 247 | 8.3 × 10⁻⁹ |
| Z16044 | 248 | 1.7 × 10⁻⁸ |
| Z16045 | 249 | 2.0 × 10⁻⁸ |
| Z16046 | 250 | 1.8 × 10⁻⁸ |
| Z16047 | 251 | 1.9 × 10⁻⁸ |
| Z16048 | 252 | 1.1 × 10⁻⁸ |
| Z16049 | 253 | 1.4 × 10⁻⁸ |
| Z16050 | 254 | 1.3 × 10⁻⁸ |
| Z16051 | 255 | 1.5 × 10⁻⁸ |
| Z16052 | 256 | 1.2 × 10⁻⁸ |
| Z16053 | 257 | 1.1 × 10⁻⁸ |
| Z16054 | 258 | 2.9 × 10⁻⁸ |
| Z16055 | 259 | 1.2 × 10⁻⁸ |
| Z16056 | 260 | 1.3 × 10⁻⁸ |
| Z16057 | 261 | 3.3 × 10⁻⁸ |
| Z16058 | 262 | 1.4 × 10⁻⁸ |
| Z16059 | 263 | 1.6 × 10⁻⁸ |
| Z16060 | 264 | 1.9 × 10⁻⁸ |
| Z16061 | 265 | 1.2 × 10⁻⁸ |
| Z16062 | 266 | 7.6 × 10⁻⁹ |
| Z16063 | 267 | 1.2 × 10⁻⁸ |
| Z16065 | 268 | 7.8 × 10⁻⁹ |

### Example 5

Production and Characterization of IL-1R-I Binding Z Variants from the First Matured Library

[0339] This Example describes the general procedure for subcloning and production of His₆-tagged and ABD-fused Z variants (originating from the first maturation library phage selection), characterization of their IL-1R-I binding, blocking and melting points.

### Materials and Methods

[0340] Subcloning of Z variants with a Hiss tag: The DNA of the respective Z variant was amplified from the phage library vector pAY02592 and was subcloned with an N-terminal His₆ tag using standard molecular biology techniques essentially as described in Example 2.

[0341] Subcloning of Z variants in fusion with ABD: The N terminal sequence of respective Z variant was mutated, in position 1 and 2 to amino acid residues A and E respectively, using standard molecular biology techniques. The resulting new Z variants were subcloned into an expression vector containing an ABD variant, giving the encoding sequence [Z#####]-ASGS-ABD, where the ABD variant was PP013 (SEQ ID NO:1661). Z##### refers to individual, 58 amino acid residue long Z variants.

[0342] Cultivation: E. coli T7E2 cells (GeneBridges) were transformed with plasmids containing the gene fragment of each respective IL-1R-I binding Z variant. The resulting recombinant strains were cultivated in media supplemented with 50 μg/ml kanamycin at 30° C. in 50 ml scale using the EnPresso protocol (BioSilta). In order to induce protein expression, IPTG was added to a final concentration of 0.2 mM at OD₆₀₀≠10. After induction, the cultivations were incubated for 16 h. The cells were harvested by centrifugation.

[0343] Purification of IL-1R-I binding Z variants with a Hiss tag: Purification was performed essentially as described in Example 2, but without the buffer exchange between the IMAC and RPC purification steps for the majority of the samples. During RPC purification, the RPC solvent A was changed to 0.1% TFA in 100% water and the linear gradient was 0-60% RPC solvent B for 18 ml.

[0344] Purification of IL-1R-I binding Z variants with ABD fusion: Approximately 2 g of each cell pellet was re-suspended in TST-buffer (25 mM Tris-HCl, 1 mM EDTA, 200 mM NaCl, 0.05% Tween20, pH 8.0) supplemented with Benzonase® (Merck). After cell disruption and clarification by centrifugation, each supernatant was applied on a gravity flow column with 1 ml agarose immobilized with an anti-ABD ligand (produced in-house). After washing with TST-buffer and 5 mM NH4Ac pH 5.5 buffer, the ABD fused Z variants were eluted with 0.1 M HAc. The buffer of the eluate was exchanged to PBS (2.68 mM KCl, 137 mM NaCl, 1.47 mM KH₂PO₄, 8.1 mM Na₂HPO₄, pH 7.4) using PD-10 desalting columns (GE Healthcare).

[0345] Protein concentrations were determined by measuring the absorbance at 280 nm, using a NanoDrop® ND-1000 spectrophotometer (Saveen Werner AB) and the extinction coefficient of the respective protein. The purity was analyzed by SDS-PAGE stained with Coomassie Blue and the identity of each purified Z variant was confirmed using LC/MS analysis.

[0346] Biacore kinetic analysis: The kinetic constants (kₒₙ and K_{off}) and affinities (K_{D}) for human and cynomolgus IL-1R-I were determined for His₆-tagged Z variants using a Biacore 2000 instrument (GE Healthcare). The experiment was run essentially as described in Example 2, using 100, 10 and 1 nM of the Z variants. The analyte injection time was 3 min followed by 15 min dissociation and 2×5 s glycine pH 3.0 (GE Healthcare, cat. no. BR100357), supplemented with 0.5 M NaCl, was used for regeneration of the surfaces between the cycles. Kinetic constants were calculated from the obtained sensorgrams of two or three concentrations of the respective Z variant, using a 1:1 binding model in the BiaEvaluation software 4.1 (GE Healthcare). His₆-tagged Z12967 was included in the assay for comparison.

[0347] In vitro IL-13 neutralization assay: His₆-tagged IL-1R-I specific Z variants were tested for their inhibitory capacity in the TF-1 cell assay. The assay was run as described in Example 2. The data on cell growth was assessed by non-linear regression to a four-parameter dose-response curve, and IC₅₀ values were determined using GraphPadPrism program. His₆-tagged Z12967 was included for comparison.

[0348] Circular dichroism (CD) spectroscopy analysis: CD was analyzed for His₆-tagged Z variants, as described in Example 2.

### Results

[0349] Subcloning with His₆ tag: Z variants were subcloned into constructs with an N-terminal His₆.

[0350] Production of His-tagged Z variants: The IL-1R-I binding Z variants with a His₆ tag were expressed as soluble gene products in E. coli. The amount of purified protein was determined spectrophotometrically by measuring the absorbance at 280 nm and ranged from approximately 1 to 7 mg protein per g pellet. SDS-PAGE analysis of each final protein preparation showed that these predominantly contained the IL-1R-I binding Z variant. The correct identity and molecular weight of each Z variant were confirmed by HPLC-MS analysis.

[0351] Biacore kinetic analysis: The interactions of His₆-tagged IL-1R-I-binding Z variants with human and cynomolgus IL-1R-I were analyzed in a Biacore instrument by injecting various concentrations of the Z variants over a surface containing immobilized IL-1R-I. A summary of the calculated kinetic parameters (K_{D}, Kₒₙ and K_{off}) for the human IL-1R-I binding is given in Table 11. The strongest binder to human IL-1R-I, Z18557 (SEQ ID NO:1205), got a K_{D} of 1.5×10⁻¹⁰ against human IL-1R-I and 7.6×10⁻⁹ M against cynomolgus IL-1R-I. The K_{D} of Z12967 to human IL-1R-I was 5.1×10⁻¹⁰ M.

TABLE 11
Kinetic parameters and affinities for
His₆-Z polypeptides binding to human IL-1R-I.

| Z variant | SEQ ID NO | kₒₙ (1/Ms) | k_{off} (1/s) | K_{D} (M) |
|---|---|---|---|---|
| Z15862 | 71 | 2.8 × 10⁶ | 1.9 × 10⁻³ | 6.7 × 10⁻¹⁰ |
| Z15876 | 1206 | 2.1 × 10⁶ | 1.3 × 10⁻³ | 6.2 × 10⁻¹⁰ |
| Z15927 | 135 | 2.4 × 10⁶ | 1.2 × 10⁻³ | 5.1 × 10⁻¹⁰ |
| Z15953 | 158 | 6.0 × 10⁶ | 1.5 × 10⁻³ | 2.4 × 10⁻¹⁰ |
| Z15961 | 166 | 4.3 × 10⁶ | 2.0 × 10⁻³ | 4.6 × 10⁻¹⁰ |
| Z16007 | 211 | 2.3 × 10⁶ | 2.1 × 10⁻³ | 9.2 × 10⁻¹⁰ |
| Z16023 | 227 | 5.3 × 10⁶ | 1.5 × 10⁻³ | 2.9 × 10⁻¹⁰ |
| Z16043 | 247 | 2.5 × 10⁶ | 1.1 × 10⁻³ | 4.4 × 10⁻¹⁰ |
| Z16062 | 266 | 2.6 × 10⁶ | 1.1 × 10⁻³ | 4.4 × 10⁻¹⁰ |
| Z16065 | 268 | 6.9 × 10⁶ | 1.3 × 10⁻³ | 1.9 × 10⁻¹⁰ |
| Z16072 | 275 | 4.6 × 10⁶ | 2.2 × 10⁻³ | 4.7 × 10⁻¹⁰ |
| Z16093 | 294 | 5.6 × 10⁶ | 1.4 × 10⁻³ | 2.5 × 10⁻¹⁰ |
| Z16097 | 298 | 3.1 × 10⁶ | 1.5 × 10⁻³ | 4.8 × 10⁻¹⁰ |
| Z16116 | 316 | 2.6 × 10⁶ | 2.3 × 10⁻³ | 8.8 × 10⁻¹⁰ |
| Z16117 | 317 | 4.0 × 10⁶ | 2.7 × 10⁻³ | 6.9 × 10⁻¹⁰ |
| Z16127 | 325 | 6.7 × 10⁶ | 1.9 × 10⁻³ | 2.9 × 10⁻¹⁰ |
| Z16143 | 341 | 3.1 × 10⁶ | 1.6 × 10⁻³ | 5.3 × 10⁻¹⁰ |
| Z16163 | 359 | 3.5 × 10⁶ | 2.0 × 10⁻³ | 5.5 × 10⁻¹⁰ |
| Z16165 | 361 | 2.1 × 10⁶ | 3.6 × 10⁻³ | 1.7 × 10⁻⁹ |
| Z16169 | 365 | 2.6 × 10⁶ | 1.0 × 10⁻³ | 3.9 × 10⁻¹⁰ |
| Z16219 | 415 | 2.5 × 10⁶ | 5.6 × 10⁻³ | 2.2 × 10⁻⁹ |
| Z16245 | 440 | 2.7 × 10⁶ | 3.1 × 10⁻³ | 1.2 × 10⁻⁹ |
| Z16255 | 449 | 3.0 × 10⁶ | 3.1 × 10⁻³ | 1.0 × 10⁻⁹ |
| Z16301 | 494 | 3.1 × 10⁶ | 2.1 × 10⁻³ | 6.6 × 10⁻¹⁰ |
| Z16341 | 531 | 3.0 × 10⁶ | 1.6 × 10⁻³ | 5.2 × 10⁻¹⁰ |
| Z16363 | 550 | 3.2 × 10⁶ | 1.8 × 10⁻³ | 5.7 × 10⁻¹⁰ |
| Z16377 | 562 | 2.1 × 10⁶ | 1.1 × 10⁻³ | 5.4 × 10⁻¹⁰ |
| Z16378 | 563 | 6.6 × 10⁶ | 3.6 × 10⁻³ | 5.5 × 10⁻¹⁰ |
| Z16681 | 856 | 3.6 × 10⁶ | 5.0 × 10⁻³ | 1.4 × 10⁻⁹ |
| Z17274 | 1176 | 1.1 × 10⁷ | 2.4 × 10⁻³ | 2.2 × 10⁻¹⁰ |
| Z17280 | 1182 | 2.4 × 10⁶ | 5.3 × 10⁻³ | 2.2 × 10⁻⁹ |
| Z17292 | 1194 | 1.3 × 10⁷ | 5.0 × 10⁻³ | 3.8 × 10⁻¹⁰ |
| Z18557 | 1205 | 4.4 × 10⁶ | 6.7 × 10⁻⁴ | 1.5 × 10⁻¹⁰ |

[0352] In vitro IL-18 neutralization assay: The IL-18 inhibition ability of Hiss-tagged IL-1R-I-binding Z variants was analyzed in a TF-1 cell assay. The resulting IC₅₀ values are presented in Table 12. Z18557 (SEQ ID NO:1205) displayed the best inhibition capacity with an IC₅₀ value below 0.5 nM. The IC₅₀ of Z12967 was 5.2 nM.

TABLE 12
IC₅₀ values for His₆-Z polypeptides from a TF-1 cell assay.

| Z variant | SEQ ID NO | IC₅₀ (nM) |
|---|---|---|
| Z15862 | 71 | 6.6 |
| Z15876 | 1206 | 2.4 |
| Z15927 | 135 | 2.5 |
| Z15953 | 158 | 3.7 |
| Z15961 | 166 | 2.9 |
| Z16007 | 211 | 5.9 |
| Z16023 | 227 | 3.8 |
| Z16043 | 247 | 2.5 |
| Z16062 | 266 | 1.8 |
| Z16065 | 268 | 1.7 |
| Z16072 | 275 | 4.3 |
| Z16093 | 294 | 3.3 |
| Z16097 | 298 | 3.4 |
| Z16116 | 316 | 4.1 |
| Z16117 | 317 | 8.5 |
| Z16127 | 325 | 4.1 |
| Z16143 | 341 | 4.8 |
| Z16163 | 359 | 1.8 |
| Z16165 | 361 | 11.5 |
| Z16169 | 365 | 0.76 |
| Z16219 | 415 | 24.2 |
| Z16245 | 440 | 8.2 |
| Z16255 | 449 | 8.5 |
| Z16301 | 494 | 4.5 |
| Z16341 | 531 | 3.9 |
| Z16363 | 550 | 8.1 |
| Z16377 | 562 | 3.1 |
| Z16378 | 586 | 32.7 |
| Z16681 | 856 | 20.1 |
| Z17274 | 1176 | 4.6 |
| Z17280 | 1182 | 5.4 |
| Z17292 | 1194 | 13.2 |
| Z18557 | 1205 | <0.5 |

[0353] CD analysis: The CD spectra determined for the IL-1R-I binding Z variants with a Hiss tag showed that each had an α-helical structure at 20° C. This result was also verified in the variable temperature measurements, wherein melting temperatures were determined (Table 13). Reversible folding was seen for all the IL-1R-I binding Z variants when overlaying spectra measured before and after heating to 90° C.

TABLE 13
Melting temperatures (Tm).

| Z variant | SEQ ID NO | Tm (° C.) |
|---|---|---|
| Z15876 | 1206 | 55 |
| Z15927 | 135 | 56 |
| Z15953 | 158 | 56 |
| Z15961 | 166 | 59 |
| Z16023 | 227 | 60 |
| Z16043 | 247 | 54 |
| Z16062 | 266 | 54 |
| Z16065 | 268 | 59 |
| Z16093 | 294 | 52 |
| Z16097 | 298 | 56 |
| Z16116 | 316 | 59 |
| Z16117 | 317 | 63 |
| Z16127 | 325 | 59 |
| Z16163 | 359 | 57 |
| Z16169 | 365 | 48 |
| Z16245 | 440 | 63 |
| Z16341 | 531 | 59 |
| Z16377 | 562 | 52 |
| Z16681 | 856 | 68 |
| Z17280 | 1182 | 62 |
| Z18557 | 1205 | 60 |

### Example 6

### Design and Construction of Two Second Matured Libraries of IL-1R-I Binding Z Variants

[0354] In this Example, two second matured libraries were constructed. The libraries were used for selections of additional IL-1R-I binding Z variants.

### Materials and Methods

[0355] Library design: The libraries were primarily based on sequences of human IL-1R-I binding Z variants described in Example 4 and 5. In the new libraries, denoted Zlib006IL-1RI.II and Zlib006IL-1RI.III, 10 variable positions in the Z molecule scaffold were biased towards certain amino acid residues and three positions were kept constant, respectively, according to a strategy mainly based on Z variants (SEQ ID NO:19-1209) from the selection from the first matured library. In addition, in both libraries, a new amino acid position was included for variation; position 12 of the 58 aa Z variant sequence, resulting in 11 variable positions, in total. Position 12 of Z18557 (SEQ ID NO: 1205), characterized in Example 5, was valine. The library design allowed for the amino acids A, V and I in position 12.

[0356] For Zlib006IL-1RI.II, a DNA linker was generated using split-pool synthesis containing the following sequence ordered from DNA 2.0 (Menlo Park, CA, USA): 5′-AA ATA AAT CTC GAG GTA GAT GCC AAA TAC GCC AAA GAA NNN NNN NNN NNN NNN NNN GAG ATC NNN NNN CTG CCT AAC CTC ACC NNN NNN CAA NNN NNN GCC TTC ATC NNN AAA TTA NNN GAT GAC CCA AGC CAG AGC TCA TTA TTT A-3′ (SEQ ID NO:1681, designed codons are denoted NNN). The design for each amino acid residue of the new library, including eleven variable amino acid positions (9, 10, 11, 12, 13, 14, 17, 18, 25, 28 and 35) and three constant amino acid positions (24, 27 and 32) in the Z molecule scaffold, are displayed in Table 14. The resulting theoretical library size was 2.2×10⁷ variants. An even theoretical distribution of the different amino acids was applied within each amino acid position, except from position 10, 11, 12, 13, 17, 28 and 35, where a higher portion of selected amino acids was applied.

[0357] For Zlib006IL-1RI.III, the library was constructed similarly as Zlib006IL-1RI.I, described in Example 3, using the TRIM technology. The DNA sequence, 5′-AA ATA AAT CTC GAG GTA GAT GCC AAA TAC GCC AAA GAA NNN NNN NNN NNN NNN NNN GAG ATC NNN NNN CTG CCT AAC CTC ACC NNN NNN CAA NNN NNN GCC TTC ATC NNN AAA TTA NNN GAT GAC CCA AGC CAG AGC TCA TTA TTT A-3 (SEQ ID NO:1682, designed codons are denoted NNN) was ordered from Ella Biotech (Martinsried, Germany). The design for each amino acid residue of the new library, including eleven variable amino acid positions (9, 10, 11, 12, 13, 14, 17, 18, 25, 32 and 35) and three constant amino acid positions (24, 27 and 28) in the Z molecule scaffold, are displayed in Table 15. The resulting theoretical library size was 1.0×10⁸ variants. An even theoretical distribution of the different amino acids was applied within each amino acid position, except from position 10, 11, 12, 32 and 35, where a higher portion of selected amino acids was applied.

TABLE 14
Zlib006IL-1RI.II library design, second maturation.

| Amino acid | Amino acid randomization | No. of |
|---|---|---|
| position in the | (percentage when uneven | different |
| Z variant molecule | distribution) | amino acids |
| 9 | A, E, I, L, T, V | 6 |
| 10 | E(50%), I, L, R, V, Y | 6 |
| 11 | A, E(27%), I, K, Q, R, T, V, Y | 9 |
| 12 | A(50%), I, V | 3 |
| 13 | A, I, L, Q(50%), V, Y | 6 |
| 14 | F, M, Q, W, Y | 5 |
| 17 | F(70%), Y(30%) | 2 |
| 18 | A, D, E, F, G, H, I, K, L, Q, R, | 16 |
| | S, T, V, W, Y | |
| 24 | R | 1 |
| 25 | K, R | 2 |
| 27 | Y | 1 |
| 28 | I, T(71.4%), V | 3 |
| 32 | R | 1 |
| 35 | F(25%), I(12.5%), L(50%), | 4 |
| | Y(12.5%) | |

TABLE 15
Zlib006IL-1RI.III library design, second maturation.

| Amino acid | Amino acid randomization | No. of |
|---|---|---|
| position in the | (percentage when uneven | different |
| Z variant molecule | distribution) | amino acids |
| 9 | A, E, I, L, T, V | 6 |
| 10 | E(60%), I, V | 3 |
| 11 | A, D, E(15%), F, H, I, K, L, Q, | 15 |
| | R, S, T, V, W, Y | |
| 12 | A(50%), I(20%), V(30%) | 3 |
| 13 | A, E, F, H, I, K, L, Q, R, S, | 14 |
| | T, V, W, Y | |
| 14 | A, E, F, H, I, K, L, Q, R, S, | 14 |
| | T, V, W, Y | |
| 17 | F, I, L, W, Y | 5 |
| 18 | A, D, E, F, G, H, I, K, L, Q, | 16 |
| | R, S, T, V, W, Y | |
| 24 | R | 1 |
| 25 | K, R | 2 |
| 27 | Y | 1 |
| 28 | T | 1 |
| 32 | I(10%), R(90%) | 2 |
| 35 | F(30%), L(70%) | 2 |

[0358] Library construction and phage stock preparation: Zlib006IL-1RI.II and Zlib006IL-1RI.III were constructed as described in WO 2016/113246 (Example 4) and in Example 3, respectively. For both libraries, E. coli XL-1 Blue was used for library transformation. Clones from the libraries of Z variants were sequenced (as described in Example 3) in order to verify the content and to evaluate the outcome of the constructed library vis-à-vis the library design.

[0359] Phage stocks containing the phagemid libraries were prepared in shake flasks. Cells from glycerol stocks containing the phagemid library were inoculated in 0.5 or 1 I, respectively, of TSB-YE medium, essentially as described for Zlib006IL-1RI.I batch 2 in Example 3. The cultivations were infected using a 10-20×molar excess of M13K07 helper phage at an OD₆₀₀ of 0.8-0.9. Phage stocks were prepared as described in Example 3.

### Results

[0360] Library construction: The new libraries were designed based on a set of IL-1R-I binding Z variants, selected from Zlib006IL-1RI.I, with verified binding properties (Examples 4 and 5). The theoretical sizes of Zlib006IL-1RI.II and Zlib006IL-1RI.III were 2.2×10⁷ and 1.0×10⁸ Z variants, respectively. The actual sizes of the libraries, determined by titration after transformation to E. coli XL-1 Blue cells, were 1.2×10⁹ and 7.0×10⁹ transformants, respectively.

[0361] The library qualities were tested by sequencing of 192 and 96 transformants from Zlib006IL-1RI.II and Zlib006IL-1RI.III, respectively, and by comparing their actual sequences with the theoretical design. The contents of the actual library compared to the designed library were shown to be satisfactory. Two matured libraries of potential binders to IL-1R-I were thus successfully constructed.

### Example 7

Selection of Z Variants from the Second Matured Libraries

[0362] In this Example, human and cynomolgus IL-1R-I were used as target proteins in phage display selections using two second matured phage libraries of Z variants.

### Materials and Methods

[0363] Phage display selection of IL-1R-I binding Z variants: The biotinylated human target proteins b-hIL-1R-I-Fc and b-hIL-1R-I, and the cynomolgus target protein b-cIL-1R-I-Fc, were used in phage selections using the new libraries of Z variant molecules described in Example 6. An overview of the selection strategy, describing the parallel selection tracks and an overall increased stringency in the selection cycles obtained by using a lowered target concentration and an increased number of washes, is shown in Table 16.

TABLE 16
Overview of selections from the two second matured libraries.

| | | Phage stock from | | Target | | |
|---|---|---|---|---|---|---|
| | Selection | library or selection | | concentration | Selection | Number of |
| Cycle | track | track | Target | (nM) | time (min) | washes |
| 1 | 1-1 | Zlib006IL-1RI.II | b-hIL-1R-I-Fc | 10 | 45 | 5 |
| 1 | 1-2 | Zlib006IL-1RI.II | b-hIL-1R-I | 10 | 45 | 5 |
| 1 | 1-3 | Zlib006IL-1RI.II | b-cIL-1R-I-Fc | 25 | 45 | 3 |
| 1 | 1-4 | Zlib006IL-1RI.III | b-hIL-1R-I-Fc | 20 | 45 | 5 |
| 1 | 1-5 | Zlib006IL-1RI.III | b-hIL-1R-I | 20 | 45 | 5 |
| 1 | 1-6 | Zlib006IL-1RI.III | b-cIL-1R-I-Fc | 50 | 45 | 3 |
| 1 | 1-7 | Zlib006IL-1RI.II | b-hIL-1R-I-Fc | 10 | 45 | 5 |
| 1 | 1-8 | Zlib006IL-1RI.II | b-hIL-1R-I | 10 | 45 | 5 |
| 1 | 1-9 | Zlib006IL-1RI.II | b-cIL-1R-I-Fc | 25 | 45 | 3 |
| 1 | 1-10 | Zlib006IL-1RI.III | b-hIL-1R-I-Fc | 20 | 45 | 5 |
| 1 | 1-11 | Zlib006IL-1RI.III | b-hIL-1R-I | 20 | 45 | 5 |
| 1 | 1-12 | Zlib006IL-1RI.III | b-cIL-1R-I-Fc | 50 | 45 | 3 |
| 2 | 2-1 | 1-1 | b-hIL-1R-I-Fc | 1 | 30 | 10* |
| 2 | 2-2 | 1-2 | b-hIL-1R-I | 2 | 30 | 10 |
| 2 | 2-3 | 1-2 | b-hIL-1R-I | 1 | 30 | 10 |
| 2 | 2-4 | 1-2 | b-hIL-1R-I | 1 | 30 | 10* |
| 2 | 2-5 | 1-3 | b-hIL-1R-I | 10 | 30 | 8 |
| 2 | 2-6 | 1-4 | b-hIL-1R-I-Fc | 4 | 30 | 8 |
| 2 | 2-7 | 1-5 | b-hIL-1R-I | 4 | 30 | 8 |
| 2 | 2-8 | 1-5 | b-hIL-1R-I | 2 | 30 | 10 |
| 2 | 2-9 | 1-5 | b-hIL-1R-I | 2 | 30 | 10* |
| 2 | 2-10 | 1-6 | b-hIL-1R-I | 20 | 30 | 6 |
| 2 | 2-11 | 1-7/1-8/1-9 pool | b-hIL-1R-I | 1 | 30 | 10* |
| 2 | 2-12 | 1-10/1-11/1-12 pool | b-hIL-1R-I | 2 | 30 | 10* |
| 3 | 3-1 | 2-1 | b-hIL-1R-I-Fc | 0.4 | 40 | 16* |
| 3 | 3-2 | 2-2 | b-hIL-1R-I | 0.4 | 40 | 15 |
| 3 | 3-3 | 2-3 | b-hIL-1R-I | 0.1 | 40 | 20 |
| 3 | 3-4 | 2-4 | b-hIL-1R-I | 0.1 | 40 | 16* |
| 3 | 3-5 | 2-5 | b-cIL-1R-I-Fc | 5 | 40 | 12 |
| 3 | 3-6 | 2-6 | b-hIL-1R-I-Fc | 0.8 | 40 | 12 |
| 3 | 3-7 | 2-7 | b-hIL-1R-I | 0.8 | 40 | 12 |
| 3 | 3-8 | 2-8 | b-hIL-1R-I | 0.2 | 40 | 20 |
| 3 | 3-9 | 2-9 | b-hIL-1R-I | 0.2 | 40 | 16* |
| 3 | 3-10 | 2-10 | b-cIL-1R-I-Fc | 10 | 40 | 9 |
| 3 | 3-11 | 2-11 | b-hIL-1R-I | 0.4 | 40 | 16* |
| 3 | 3-12 | 2-12 | b-hIL-1R-I | 0.4 | 40 | 16* |
| 4 | 4-1 | 3-1 | b-hIL-1R-I-Fc | 0.125 | 40 | 20** |
| 4 | 4-2 | 3-2 | b-hIL-1R-I | 0.125 | 40 | 20 |
| 4 | 4-3 | 3-3 | b-hIL-1R-I | 0.05 | 40 | 30 |
| 4 | 4-4 | 3-4 | b-hIL-1R-I | 0.05 | 40 | 20** |
| 4 | 4-5 | 3-5 | b-hIL-1R-I | 1 | 40 | 16 |
| 4 | 4-6 | 3-6 | b-hIL-1R-I-Fc | 0.16 | 40 | 16* |
| 4 | 4-7 | 3-7 | b-hIL-1R-I | 0.16 | 40 | 16 |
| 4 | 4-8 | 3-8 | b-hIL-1R-I | 0.1 | 40 | 30 |
| 4 | 4-9 | 3-9 | b-hIL-1R-I | 0.1 | 40 | 20** |
| 4 | 4-10 | 3-10 | b-hIL-1R-I | 2 | 40 | 16 |
| 4 | 4-11 | 3-11 | b-hIL-1R-I | 0.2 | 40 | 16 |
| 4 | 4-12 | 3-12 | b-hIL-1R-I | 0.2 | 40 | 16 |

*Addition of hIL-1R-I in the second final wash step.
**Selection track divided into two before second final wash step. One part submitted to an over-night wash in the presence of hIL-1R-I and one part submitted to a 1 h wash in PBST.

[0364] The selections were performed in four cycles essentially as described in Example 4, with the following exceptions 1-3. Exception 1: pre-selection was performed in selection round 1 and 2 for >60 min at RT by incubation of phage stocks with SA beads (b-hIL-1R-I tracks) or Fc/SA beads (b-IL-1RI-Fc tracks). Exception 2: in the second final wash step of tracks 2-1, 2-4, 2-9, 2-11, 2-12, 3-1, 3-4, 3-9, 3-11 and 3-12, respectively, hIL-1R-I was added to the wash buffer in 100 times higher concentration than the target concentration of the respective track and the wash was run for 15-20 min. Exception 3: In the fourth selection round, the tracks 4-1, 4-4 and 4-6 were divided into two before the second final wash step. For one part, hIL-1R-I was added to the wash buffer in 100 times higher concentration than the target concentration of the respective track and the second final wash was run overnight. For the other part, a 1 h wash in PBST was applied for the second final wash.

[0365] In the first selection cycle, twelve selection tracks were run; 1-1 to 1-12. In cycle two, two tracks were divided into three, and six tracks were pooled into two tracks, resulting in a total of 12 parallel tracks in cycle 2, 3 and 4; 2-1 to 2-12, 3-1 to 3-12 and 4-1 to 4-12, respectively. All selection tracks are presented in Table 16. The number of phage particles used for selections was typically more than 2000 times the number of eluted phage particles in the previous cycle.

### Results

[0366] Phage display selection of IL-1R-I binding Z variants: Individual clones were obtained after four cycles of phage display selections against human and cynomolgus IL-1R-I.

### Example 8

Screening of Z Variants from the First and Second Matured Libraries

[0367] In this Example, DNA of selected clones from Example 4 and Example 7 was sequenced, the Z variants were produced in E. coli periplasmic fractions and assayed against IL-1R-I in ELISA and Biacore.

### Materials and Methods

[0368] Sequencing of potential binders: Individual clones from cycle 4 of selections using the three matured libraries Zlib006IL-1RI.I, Zlib006IL-1RI.II and Zlib006IL-1RI.III were picked for sequencing. Amplification and sequence analysis of gene fragments were performed essentially as described in Example 1.

[0369] Production of Z variants for ELISA and Biacore screening: Z variants were produced essentially as described in Example 4 with the exception that the periplasmic extracts were prepared by heat-treatment (82° C., 20 min) followed by clarification by filtration. Z variants screened in Biacore were diluted five times in HBS-EP buffer.

[0370] ELISA screening of Z variants: The binding of Z variants to human IL-1R-I was analyzed in ELISA, essentially as described in Example 1, using 0.2 nM hIL-1R-I-Fc as target protein. As negative control, a periplasmic extract of ABD001 was used.

[0371] EC₅₀ analysis of Z variants: A selection of IL-1R-I binding was subjected to an analysis of response against a dilution series of hIL-1R-I-Fc using ELISA as described above. The target protein hIL-1R-I-Fc was diluted stepwise 1:10 from 20 to 0.002 nM. As a background control, the Z variants were assayed with no target protein added. Obtained data was analyzed using GraphPad Prism 5 and non-linear regression, and the EC₅₀ values (the half maximal effective concentration) were calculated. Periplasmic extracts with Z12967, Z16065 and Z16218 (corresponding to SEQ ID: 9, 268 and 414, respectively) were analyzed in parallel for signal comparison. As negative control, a periplasmic extract of ABD001 was used.

[0372] Biacore screening of Z variants: The binding of Z variants to human IL-1R-I was analyzed in a kinetic screening, using a Biacore 2000 instrument, essentially as described in Example 4, but with the exception that Z-ABD (ABD001, SEQ ID NO:1660) periplasmic extracts were injected during 2 min. Periplasmic extracts of Z12967, Z16065 and Z16218 were included in the screening analysis in duplicates for comparison. A periplasmic extract with ABD (ABD001, SEQ ID NO:1660) was included as negative control.

### Results

[0373] Sequencing: Sequencing was performed for clones obtained after four cycles of selection. Each variant was given a unique identification number #####, and individual variants are referred to as Z#####. The amino acid sequences of the 58 amino acid residues long Z variants are listed in FIGS. 1A-1BK and in the sequence listing as SEQ ID NO: 1210-1632. The deduced IL-1R-I binding motifs extend from residue 8 to residue 36 in each sequence. The amino acid sequences of the 49 amino acid residues long polypeptides predicted to constitute the complete three-helix bundle within each of these Z variants extend from residue 7 to residue 55.

[0374] ELISA screening of Z variants: Clones obtained after four cycles of selection were produced individually in 96-well plates and were screened for human IL-1R-I binding activity in ELISA. 99.5% of the assayed Z variants gave a positive signal of 2× the blank control or higher against 0.2 nM hIL-1R-I-Fc.

[0375] EC₅₀ analysis of Z variants: A subset of 102 Z variants displaying results over 0.74 AU (8.2× the blank control) was subjected to ELISA target titration using hIL-1R-I-Fc. Obtained results were used for calculation of EC₅₀ values (Table 17). The results for Z12967, Z16065 and Z16218 were 2.6×10-10, 2.1×10⁻¹⁰ and 2.2×10⁻¹⁰ M, respectively.

TABLE 17
Calculated EC₅₀ values from ELISA titration analysis.

| | SEQ ID | |
|---|---|---|
| Z variant | NO | EC₅₀ (M) |
| Z15840 | 49 | 2.3 × 10⁻¹⁰ |
| Z15862 | 71 | 2.5 × 10⁻¹⁰ |
| Z15876 | 1206 | 1.9 × 10⁻¹⁰ |
| Z15934 | 1208 | 1.7 × 10⁻¹⁰ |
| Z15945 | 150 | 2.3 × 10⁻¹⁰ |
| Z15975 | 1209 | 1.9 × 10⁻¹⁰ |
| Z16062 | 266 | 2.1 × 10⁻¹⁰ |
| Z16183 | 379 | 2.3 × 10⁻¹⁰ |
| Z16208 | 404 | 2.2 × 10⁻¹⁰ |
| Z16603 | 782 | 2.2 × 10⁻¹⁰ |
| Z16606 | 785 | 2.3 × 10⁻¹⁰ |
| Z18754 | 1252 | 3.5 × 10⁻¹⁰ |
| Z18757 | 1321 | 3.0 × 10⁻¹⁰ |
| Z18758 | 1281 | 2.4 × 10⁻¹⁰ |
| Z18759 | 1314 | 2.4 × 10⁻¹⁰ |
| Z18760 | 1435 | 1.7 × 10⁻¹⁰ |
| Z18763 | 1431 | 2.6 × 10⁻¹⁰ |
| Z18766 | 1274 | 3.3 × 10⁻¹⁰ |
| Z18769 | 1339 | 2.9 × 10⁻¹⁰ |
| Z18770 | 1284 | 2.8 × 10⁻¹⁰ |
| Z18771 | 1341 | 2.5 × 10⁻¹⁰ |
| Z18774 | 1389 | 2.6 × 10⁻¹⁰ |
| Z18776 | 1418 | 2.2 × 10⁻¹⁰ |
| Z18777 | 1326 | 2.6 × 10⁻¹⁰ |
| Z18785 | 1323 | 2.5 × 10⁻¹⁰ |
| Z18786 | 1320 | 2.4 × 10⁻¹⁰ |
| Z18790 | 1439 | 2.6 × 10⁻¹⁰ |
| Z18799 | 1423 | 2.3 × 10⁻¹⁰ |
| Z18803 | 1327 | 2.5 × 10⁻¹⁰ |
| Z18804 | 1329 | 2.7 × 10⁻¹⁰ |
| Z18805 | 1437 | 2.7 × 10⁻¹⁰ |
| Z18806 | 1271 | 2.7 × 10⁻¹⁰ |
| Z18808 | 1342 | 4.0 × 10⁻¹⁰ |
| Z18810 | 1278 | 2.9 × 10⁻¹⁰ |
| Z18811 | 1405 | 2.8 × 10⁻¹⁰ |
| Z18813 | 1375 | 2.0 × 10⁻¹⁰ |
| Z18814 | 1368 | 2.7 × 10⁻¹⁰ |
| Z18819 | 1276 | 2.9 × 10⁻¹⁰ |
| Z18820 | 1417 | 3.3 × 10⁻¹⁰ |
| Z18824 | 1264 | 2.8 × 10⁻¹⁰ |
| Z18825 | 1275 | 3.5 × 10⁻¹⁰ |
| Z18826 | 1356 | 2.4 × 10⁻¹⁰ |
| Z18827 | 1318 | 2.4 × 10⁻¹⁰ |
| Z18831 | 1308 | 2.9 × 10⁻¹⁰ |
| Z18832 | 1340 | 1.5 × 10⁻¹⁰ |
| Z18834 | 1361 | 2.5 × 10⁻¹⁰ |
| Z18836 | 1430 | 2.3 × 10⁻¹⁰ |
| Z18838 | 1337 | 2.4 × 10⁻¹⁰ |
| Z18843 | 1309 | 2.8 × 10⁻¹⁰ |
| Z18846 | 1331 | 1.9 × 10⁻¹⁰ |
| Z18866 | 1324 | 3.1 × 10⁻¹⁰ |
| Z18874 | 1421 | 2.2 × 10⁻¹⁰ |
| Z18875 | 1420 | 2.9 × 10⁻¹⁰ |
| Z18877 | 1301 | 3.5 × 10⁻¹⁰ |
| Z18878 | 1302 | 3.7 × 10⁻¹⁰ |
| Z18879 | 1390 | 3.4 × 10⁻¹⁰ |
| Z18881 | 1355 | 2.8 × 10⁻¹⁰ |
| Z18882 | 1311 | 3.1 × 10⁻¹⁰ |
| Z18884 | 1403 | 2.3 × 10⁻¹⁰ |
| Z18886 | 1432 | 2.9 × 10⁻¹⁰ |
| Z18887 | 1386 | 2.1 × 10⁻¹⁰ |
| Z18888 | 1422 | 2.3 × 10⁻¹⁰ |
| Z18889 | 1344 | 2.4 × 10⁻¹⁰ |
| Z18890 | 1352 | 2.5 × 10⁻¹⁰ |
| Z18904 | 1587 | 3.8 × 10⁻¹⁰ |
| Z18908 | 1591 | 2.4 × 10⁻¹⁰ |
| Z18912 | 1251 | 1.4 × 10⁻¹⁰ |
| Z18917 | 1509 | 2.2 × 10⁻¹⁰ |
| Z18920 | 1270 | 2.4 × 10⁻¹⁰ |
| Z18966 | 1272 | 2.5 × 10⁻¹⁰ |
| Z18967 | 1388 | 3.1 × 10⁻¹⁰ |
| Z18968 | 1472 | 2.0 × 10⁻¹⁰ |
| Z18971 | 1559 | 3.5 × 10⁻¹⁰ |
| Z18982 | 1553 | 2.5 × 10⁻¹⁰ |
| Z19012 | 1588 | 2.4 × 10⁻¹⁰ |
| Z19053 | 1526 | 2.4 × 10⁻¹⁰ |
| Z19054 | 1528 | 2.5 × 10⁻¹⁰ |
| Z19056 | 1586 | 2.2 × 10⁻¹⁰ |
| Z19057 | 1558 | 2.2 × 10⁻¹⁰ |
| Z19059 | 1240 | 3.5 × 10⁻¹⁰ |
| Z19060 | 1228 | 2.2 × 10⁻¹⁰ |
| Z19072 | 1554 | 1.6 × 10⁻¹⁰ |
| Z19075 | 1618 | 1.5 × 10⁻¹⁰ |
| Z19078 | 1248 | 2.2 × 10⁻¹⁰ |
| Z19085 | 1564 | 2.1 × 10⁻¹⁰ |
| Z19090 | 1540 | 2.0 × 10⁻¹⁰ |
| Z19115 | 1489 | 2.3 × 10⁻¹⁰ |
| Z19117 | 1631 | 2.1 × 10⁻¹⁰ |
| Z19118 | 1579 | 2.3 × 10⁻¹⁰ |
| Z19123 | 1241 | 2.6 × 10⁻¹⁰ |
| Z19151 | 1594 | 2.3 × 10⁻¹⁰ |
| Z19158 | 1571 | 1.5 × 10⁻¹⁰ |
| Z19159 | 1364 | 2.1 × 10⁻¹⁰ |
| Z19171 | 1593 | 2.3 × 10⁻¹⁰ |
| Z19172 | 1551 | 1.6 × 10⁻¹⁰ |
| Z19180 | 1393 | 2.0 × 10⁻¹⁰ |
| Z19181 | 1549 | 1.8 × 10⁻¹⁰ |
| Z19182 | 1628 | 1.7 × 10⁻¹⁰ |
| Z19183 | 1235 | 2.2 × 10⁻¹⁰ |
| Z19302 | 1419 | 2.6 × 10⁻¹⁰ |
| Z19304 | 1273 | 2.7 × 10⁻¹⁰ |
| Z19305 | 1261 | 2.6 × 10⁻¹⁰ |

[0376] Biacore screening of Z variants: A subset of 188 IL-1R-I binding Z variants was submitted to a Biacore kinetic screening. A single concentration of hIL-1R-I was injected over each Z-ABD captured from periplasmic extracts on a sensor chip surface containing an anti-ABD antibody. The calculated screening affinities are presented in Table 18. The K_{D} values of Z12967, Z16065 and Z16218 were 2.7×10⁻⁸, 7.5×10⁻⁹ and 1.3×10⁻⁸ M (average of duplicates), respectively.

[0377] Z18814, which has an amino acid sequence that only differs from Z16065 in position X₅ of the binding motif BM, has three times higher affinity than Z16065. Z16065 has the highest binding affinity (K_{D}) among the IL-1R-I binding Z variants (Table 11) with an alanine residue in position X₅. Z18814 has an isoleucine residue in position X₅. Several Z variants with valine or isoleucine in position X₅ were found to have high affinity to IL-1R-I.

TABLE 18
Calculated KD values from Biacore kinetic screening.

| | | Biacore |
|---|---|---|
| | SEQ | screening |
| Z variant | ID NO | K_{D} (M) |
| Z15840 | 49 | 6.9 × 10⁻⁹ |
| Z15862 | 71 | 1.3 × 10⁻⁸ |
| Z15876 | 1206 | 5.7 × 10⁻⁹ |
| Z15932 | 1207 | 5.5 × 10⁻⁹ |
| Z15934 | 1208 | 9.4 × 10⁻⁹ |
| Z15945 | 150 | 9.6 × 10⁻⁹ |
| Z15975 | 1209 | 8.9 × 10⁻⁹ |
| Z16062 | 266 | 6.4 × 10⁻⁹ |
| Z16183 | 379 | 6.5 × 10⁻⁹ |
| Z16191 | 387 | 6.3 × 10⁻⁹ |
| Z16208 | 404 | 1.1 × 10⁻⁸ |
| Z16397 | 582 | 1.3 × 10⁻⁸ |
| Z16440 | 624 | 1.3 × 10⁻⁸ |
| Z16603 | 782 | 9.1 × 10⁻⁹ |
| Z16606 | 785 | 9.6 × 10⁻⁹ |
| Z16737 | 910 | 1.2 × 10⁻⁸ |
| Z18754 | 1252 | 2.5 × 10⁻⁹ |
| Z18756 | 1366 | 2.9 × 10⁻⁹ |
| Z18757 | 1321 | 3.0 × 10⁻⁹ |
| Z18758 | 1281 | 4.8 × 10⁻⁹ |
| Z18759 | 1314 | 3.4 × 10⁻⁹ |
| Z18760 | 1435 | 3.0 × 10⁻⁹ |
| Z18762 | 1415 | 2.1 × 10⁻⁹ |
| Z18763 | 1431 | 5.2 × 10⁻⁹ |
| Z18766 | 1274 | 3.1 × 10⁻⁹ |
| Z18767 | 12353 | 5.1 × 10⁻⁹ |
| Z18769 | 1339 | 2.7 × 10⁻⁹ |
| Z18770 | 1284 | 2.6 × 10⁻⁹ |
| Z18771 | 1341 | 3.0 × 10⁻⁹ |
| Z18774 | 1389 | 3.0 × 10⁻⁹ |
| Z18776 | 1418 | 2.8 × 10⁻⁹ |
| Z18777 | 1326 | 3.8 × 10⁻⁹ |
| Z18782 | 1333 | 2.7 × 10⁻⁹ |
| Z18783 | 1257 | 3.4 × 10⁻⁹ |
| Z18784 | 1433 | 3.7 × 10⁻⁹ |
| Z18785 | 1323 | 2.7 × 10⁻⁹ |
| Z18786 | 1320 | 4.8 × 10⁻⁹ |
| Z18790 | 1439 | 3.0 × 10⁻⁹ |
| Z18794 | 1424 | 3.7 × 10⁻⁹ |
| Z18796 | 1352 | 3.6 × 10⁻⁹ |
| Z18798 | 1268 | 3.2 × 10⁻⁹ |
| Z18799 | 1423 | 2.6 × 10⁻⁹ |
| Z18800 | 1328 | 1.9 × 10⁻⁹ |
| Z18803 | 1327 | 3.1 × 10⁻⁹ |
| Z18804 | 1329 | 3.3 × 10⁻⁹ |
| Z18805 | 1437 | 3.7 × 10⁻⁹ |
| Z18806 | 1271 | 4.1 × 10⁻⁹ |
| Z18807 | 1400 | 3.8 × 10⁻⁹ |
| Z18808 | 1342 | 4.2 × 10⁻⁹ |
| Z18810 | 1278 | 3.1 × 10⁻⁹ |
| Z18811 | 1405 | 4.5 × 10⁻⁹ |
| Z18813 | 1375 | 2.0 × 10⁻⁹ |
| Z18814 | 1368 | 2.4 × 10⁻⁹ |
| Z18817 | 1343 | 3.5 × 10⁻⁹ |
| Z18819 | 1276 | 3.0 × 10⁻⁹ |
| Z18820 | 1417 | 3.3 × 10⁻⁹ |
| Z18821 | 1269 | 3.5 × 10⁻⁹ |
| Z18823 | 1282 | 2.4 × 10⁻⁹ |
| Z18824 | 1264 | 3.3 × 10⁻⁹ |
| Z18825 | 1275 | 4.9 × 10⁻⁹ |
| Z18826 | 1356 | 3.5 × 10⁻⁹ |
| Z18827 | 1318 | 4.3 × 10⁻⁹ |
| Z18828 | 1296 | 2.6 × 10⁻⁹ |
| Z18830 | 1295 | 2.9 × 10⁻⁹ |
| Z18831 | 1308 | 3.0 × 10⁻⁹ |
| Z18832 | 1340 | 1.6 × 10⁻⁹ |
| Z18833 | 1297 | 3.8 × 10⁻⁹ |
| Z18834 | 1361 | 2.4 × 10⁻⁹ |
| Z18836 | 1430 | 2.9 × 10⁻⁹ |
| Z18838 | 1337 | 3.3 × 10⁻⁹ |
| Z18839 | 1440 | 3.1 × 10⁻⁹ |
| Z18841 | 1359 | 2.5 × 10⁻⁹ |
| Z18843 | 1309 | 3.1 × 10⁻⁹ |
| Z18844 | 1349 | 4.0 × 10⁻⁹ |
| Z18846 | 1331 | 2.1 × 10⁻⁹ |
| Z18847 | 1363 | 3.0 × 10⁻⁹ |
| Z18848 | 1304 | 3.0 × 10⁻⁹ |
| Z18849 | 1299 | 3.0 × 10⁻⁹ |
| Z18850 | 1367 | 2.6 × 10⁻⁹ |
| Z18851 | 1291 | 3.6 × 10⁻⁹ |
| Z18853 | 1298 | 2.3 × 10⁻⁹ |
| Z18856 | 1330 | 2.9 × 10⁻⁹ |
| Z18860 | 1265 | 6.2 × 10⁻⁹ |
| Z18861 | 1369 | 3.3 × 10⁻⁹ |
| Z18863 | 1362 | 2.4 × 10⁻⁹ |
| Z18866 | 1324 | 2.7 × 10⁻⁹ |
| Z18868 | 1391 | 2.7 × 10⁻⁹ |
| Z18870 | 1428 | 3.0 × 10⁻⁹ |
| Z18871 | 1332 | 3.5 × 10⁻⁹ |
| Z18872 | 1410 | 2.6 × 10⁻⁹ |
| Z18873 | 1306 | 3.1 × 10⁻⁹ |
| Z18874 | 1421 | 2.3 × 10⁻⁹ |
| Z18875 | 1420 | 2.7 × 10⁻⁹ |
| Z18876 | 1286 | 3.7 × 10⁻⁹ |
| Z18877 | 1301 | 2.7 × 10⁻⁹ |
| Z18878 | 1302 | 3.8 × 10⁻⁹ |
| Z18879 | 1390 | 6.2 × 10⁻⁹ |
| Z18881 | 1355 | 3.2 × 10⁻⁹ |
| Z18882 | 1311 | 2.6 × 10⁻⁹ |
| Z18884 | 1403 | 2.7 × 10⁻⁹ |
| Z18885 | 1294 | 3.9 × 10⁻⁹ |
| Z18886 | 1432 | 3.9 × 10⁻⁹ |
| Z18887 | 1386 | 2.9 × 10⁻⁹ |
| Z18888 | 1422 | 2.6 × 10⁻⁹ |
| Z18889 | 1344 | 3.4 × 10⁻⁹ |
| Z18890 | 1352 | 3.1 × 10⁻⁹ |
| Z18893 | 1353 | 2.1 × 10⁻⁹ |
| Z18894 | 1312 | 2.5 × 10⁻⁹ |
| Z18895 | 1411 | 2.6 × 10⁻⁹ |
| Z18896 | 1436 | 3.5 × 10⁻⁹ |
| Z18898 | 1285 | 2.5 × 10⁻⁹ |
| Z18904 | 1587 | 3.4 × 10⁻⁹ |
| Z18908 | 1591 | 3.6 × 10⁻⁹ |
| Z18909 | 1303 | 2.7 × 10⁻⁹ |
| Z18910 | 1416 | 3.1 × 10⁻⁹ |
| Z18911 | 1441 | 2.8 × 10⁻⁹ |
| Z18912 | 1251 | 3.6 × 10⁻⁹ |
| Z18916 | 1536 | 4.1 × 10⁻⁹ |
| Z18917 | 1509 | 7.1 × 10⁻⁹ |
| Z18919 | 1350 | 2.8 × 10⁻⁹ |
| Z18920 | 1270 | 3.2 × 10⁻⁹ |
| Z18922 | 1533 | 4.9 × 10⁻⁹ |
| Z18923 | 1482 | 9.0 × 10⁻⁹ |
| Z18925 | 1479 | 1.1 × 10⁻⁸ |
| Z18927 | 1372 | 3.4 × 10⁻⁹ |
| Z18938 | 1370 | 4.5 × 10⁻⁹ |
| Z18941 | 1409 | 3.3 × 10⁻⁹ |
| Z18942 | 1483 | 1.5 × 10⁻⁸ |
| Z18948 | 1414 | 4.3 × 10⁻⁹ |
| Z18952 | 1290 | 3.0 × 10⁻⁹ |
| Z18956 | 1625 | 1.4 × 10⁻⁸ |
| Z18958 | 1283 | 2.8 × 10⁻⁹ |
| Z18959 | 1357 | 2.9 × 10⁻⁹ |
| Z18966 | 1272 | 2.9 × 10⁻⁹ |
| Z18967 | 1388 | 3.2 × 10⁻⁹ |
| Z18968 | 1472 | 2.4 × 10⁻⁹ |
| Z18971 | 1559 | 5.5 × 10⁻⁹ |
| Z18982 | 1553 | 5.2 × 10⁻⁹ |
| Z18989 | 1592 | 4.5 × 10⁻⁹ |
| Z19012 | 1588 | 4.5 × 10⁻⁹ |
| Z19031 | 1600 | 3.1 × 10⁻⁹ |
| Z19043 | 1505 | 3.4 × 10⁻⁹ |
| Z19053 | 1526 | 8.7 × 10⁻⁹ |
| Z19054 | 1528 | 7.0 × 10⁻⁹ |
| Z19056 | 1586 | 6.9 × 10⁻⁹ |
| Z19057 | 1558 | 4.2 × 10⁻⁹ |
| Z19059 | 1240 | 9.2 × 10⁻⁹ |
| Z19060 | 1228 | 1.0 × 10⁻⁸ |
| Z19072 | 1554 | 5.2 × 10⁻⁹ |
| Z19075 | 1618 | 4.8 × 10⁻⁹ |
| Z19078 | 1248 | 9.5 × 10⁻⁹ |
| Z19079 | 1236 | 1.4 × 10⁻⁸ |
| Z19085 | 1564 | 4.9 × 10⁻⁹ |
| Z19090 | 1540 | 3.0 × 10⁻⁹ |
| Z19094 | 1231 | 1.8 × 10⁻⁸ |
| Z19099 | 1548 | 3.8 × 10⁻⁹ |
| Z19107 | 1566 | 6.7 × 10⁻⁹ |
| Z19115 | 1489 | 6.1 × 10⁻⁹ |
| Z19117 | 1631 | 4.2 × 10⁻⁹ |
| Z19118 | 1579 | 8.4 × 10⁻⁹ |
| Z19123 | 1241 | 1.1 × 10⁻⁸ |
| Z19127 | 1213 | 9.8 × 10⁻⁹ |
| Z19135 | 1247 | 1.6 × 10⁻⁸ |
| Z19141 | 1506 | 1.7 × 10⁻⁸ |
| Z19143 | 1471 | 1.4 × 10⁻⁹ |
| Z19144 | 1374 | 3.1 × 10⁻⁹ |
| Z19146 | 1434 | 2.9 × 10⁻⁹ |
| Z19147 | 1307 | 2.4 × 10⁻⁹ |
| Z19151 | 1594 | 2.7 × 10⁻⁹ |
| Z19153 | 1310 | 3.1 × 10⁻⁹ |
| Z19158 | 1571 | 1.5 × 10⁻⁹ |
| Z19159 | 1364 | 1.9 × 10⁻⁹ |
| Z19160 | 1379 | 3.8 × 10⁻⁹ |
| Z19166 | 1305 | 3.5 × 10⁻⁹ |
| Z19168 | 1500 | 4.6 × 10⁻⁹ |
| Z19169 | 1402 | 2.7 × 10⁻⁹ |
| Z19170 | 1334 | 2.0 × 10⁻⁹ |
| Z19171 | 1593 | 3.0 × 10⁻⁹ |
| Z19172 | 1551 | 4.5 × 10⁻⁹ |
| Z19180 | 1393 | 7.9 × 10⁻¹⁰ |
| Z19181 | 1549 | 9.7 × 10⁻⁹ |
| Z19182 | 1628 | 2.8 × 10⁻⁹ |
| Z19183 | 1235 | 1.2 × 10⁻⁸ |
| Z19302 | 1419 | 3.2 × 10⁻⁹ |
| Z19303 | 1262 | 4.0 × 10⁻⁹ |
| Z19304 | 1273 | 4.5 × 10⁻⁹ |
| Z19305 | 1261 | 3.8 × 10⁻⁹ |

### Example 9

Production and Characterization of Z Variants from the First and Second Matured Libraries

[0378] This Example describes the general procedure for subcloning and production of His₆-tagged Z variants originating from the first and second maturation library phage selections, characterization of their target binding, target blocking and melting points.

### Materials and Methods

[0379] Subcloning of Z variants with a Hiss tag: A subset of Z variants screened in Example 8 was chosen for subcloning. The DNA of the respective Z variant was amplified from the phage library vector pAY02592 and was subcloned with an N-terminal Hiss tag using standard molecular biology techniques essentially as described in Example 2.

[0380] Cultivation: E. coli T7E2 cells (GeneBridges) were transformed with plasmids containing the gene fragment of each respective IL-1R-I binding Z variant. The resulting recombinant strains were cultivated in media supplemented with 50 μg/ml kanamycin at 30° C. in 50 ml scale using the EnPresso protocol (BioSilta). In order to induce protein expression, IPTG was added to a final concentration of 0.2 mM at OD₆₀₀≈10. After induction, the cultivations were incubated for 16 h. The cells were harvested by centrifugation.

[0381] Purification of IL-1R-I binding Z variants with a His₆ tag: Approximately ⅔ of the IL-1R-I binding Z variants were purified as described in Example 2 but without the buffer exchange between the IMAC and RPC purification steps. The linear gradient during RPC purification was also changed to 0-60% RPC solvent B for 18 ml. The remaining ⅓ of the IL-1R-I binding Z variants were only IMAC purified before the final buffer exchange to PBS. Purification was essentially performed as described in the first part of Example 2. Approximately 1-2 g of each cell pellet was used.

[0382] Biacore kinetic analysis: The kinetic constants (kₒₙ and K_{off}) and affinities (K_{D}) for human and cynomolgus IL-1R-I were determined for His₆-tagged Z variants using a Biacore 2000 instrument (GE Healthcare). The experiment was run essentially as described in Example 5, using 48, 12, 3 and 0.75 nM of the Z variants. The analyte injection time was 3 min followed by 6 min dissociation and 2×5 s glycine pH 3.0, supplemented with 0.5 M NaCl, was used for regeneration of the surfaces between the cycles. Kinetic constants were calculated from the obtained sensorgrams of three or four concentrations of the respective Z variant, using a 1:1 binding model in the BiaEvaluation software 4.1 (GE Healthcare). His₆-tagged Z12967 (SEQ ID NO: 9), Z16065 (SEQ ID NO:268), Z16163 (SEQ ID NO:359) and Z18557 (SEQ ID NO:1205) were included in the assay for comparison.

[0383] In vitro IL-13 neutralization assay: His₆-tagged IL-1R-I specific Z variants were tested for their inhibitory capacity in the TF-1 cell assay. The assay was run as described in Example 2. The data on cell growth was assessed by non-linear regression to a four-parameter dose-response curve, and IC₅₀ values were determined using GraphPadPrism program. His₆-tagged Z12967, Z16065, Z16163 and Z18557 were included for comparison.

[0384] Circular dichroism (CD) spectroscopy analysis: CD was analyzed for His₆-tagged Z variants, as described in Example 2.

### Results

[0385] Production of Hiss-tagged Z variants: The IL-1R-I binding Z variants with a His₆ tag were expressed as soluble gene products in E. coli. The amount of purified protein was determined spectrophotometrically by measuring the absorbance at 280 nm and ranged from approximately 0.4 to 7 mg protein per g pellet for IL-1R-I binding Z variants which were both IMAC and RPC purified. The amount of purified protein ranged from approximately 4 to 15 mg protein per g pellet for IL-1R-I binding Z variants which were only IMAC purified. SDS-PAGE analysis of each final protein preparation showed that these predominantly contained the IL-1R-I binding Z variant. The correct identity and molecular weight of each Z variant were confirmed by HPLC-MS analysis.

[0386] Biacore kinetic analysis: The interactions of His₆-tagged IL-1R-I-binding Z variants with human and cynomolgus IL-1R-I were analyzed in a Biacore instrument by injecting various concentrations of the Z variants over a surface containing immobilized IL-1R-I. A summary of the calculated kinetic parameters (K_{D}, Kₒₙ and K_{off}) for the human IL-1R-I binding is given in Table 19. The K_{D} values of Z12967, Z16065, Z16163 and Z18557 were 8.2×10⁻¹⁰, 5.1×10⁻¹⁰, 7.6×10⁻¹⁰ and 1.4×10⁻¹⁰ M, respectively. The K_{D} values of cynomolgus IL-1R-I binding were 2.0×10⁻⁹, 6.7×10⁻⁹ and 3.3×10⁻⁹ M for Z18754, Z18760 and Z18800, respectively.

TABLE 19
Kinetic parameters and affinities for
His₆-Z polypeptides binding to human IL-1R-I.

| Z variant | SEQ ID NO | kₒₙ (1/Ms) | k_{off} (1/s) | K_{D} (M) |
|---|---|---|---|---|
| Z15876 | 1206 | 5.2 × 10⁶ | 4.1 × 10⁻³ | 8.0 × 10⁻¹⁰ |
| Z15932 | 1207 | 1.8 × 10⁷ | 1.1 × 10⁻² | 6.4 × 10⁻¹⁰ |
| Z15934 | 1208 | 1.4 × 10⁷ | 1.1 × 10⁻² | 7.5 × 10⁻¹⁰ |
| Z15975 | 1209 | 4.1 × 10⁷ | 2.9 × 10⁻² | 7.1 × 10⁻¹⁰ |
| Z18754 | 1252 | 7.0 × 10⁷ | 6.0 × 10⁻³ | 8.6 × 10⁻¹¹ |
| Z18760 | 1435 | 1.3 × 10⁷ | 2.7 × 10⁻³ | 2.1 × 10⁻¹⁰ |
| Z18762 | 1415 | 4.2 × 10⁷ | 5.2 × 10⁻³ | 1.3 × 10⁻¹⁰ |
| Z18769 | 1339 | 1.9 × 10⁷ | 3.1 × 10⁻³ | 1.6 × 10⁻¹⁰ |
| Z18770 | 1284 | 3.0 × 10⁷ | 5.0 × 10⁻³ | 1.7 × 10⁻¹⁰ |
| Z18799 | 1423 | 2.6 × 10⁷ | 4.5 × 10⁻³ | 1.8 × 10⁻¹⁰ |
| Z18800 | 1328 | 1.8 × 10⁷ | 2.5 × 10⁻³ | 1.4 × 10⁻¹⁰ |
| Z18813 | 1375 | 2.0 × 10⁷ | 3.9 × 10⁻³ | 2.0 × 10⁻¹⁰ |
| Z18814 | 1368 | 3.0 × 10⁷ | 4.4 × 10⁻³ | 1.5 × 10⁻¹⁰ |
| Z18817 | 1343 | 2.8 × 10⁷ | 4.8 × 10⁻³ | 1.7 × 10⁻¹⁰ |
| Z18823 | 1283 | 4.7 × 10⁶ | 1.8 × 10⁻³ | 3.8 × 10⁻¹⁰ |
| Z18831 | 1308 | 4.0 × 10⁷ | 5.3 × 10⁻³ | 1.3 × 10⁻¹⁰ |
| Z18832 | 1340 | 5.9 × 10⁷ | 7.0 × 10⁻³ | 1.2 × 10⁻¹⁰ |
| Z18834 | 1361 | 5.8 × 10⁷ | 8.0 × 10⁻³ | 1.4 × 10⁻¹⁰ |
| Z18846 | 1331 | 4.7 × 10⁷ | 5.1 × 10⁻³ | 1.1 × 10⁻¹⁰ |
| Z18850 | 1367 | 1.3 × 10⁷ | 2.3 × 10⁻³ | 1.7 × 10⁻¹⁰ |
| Z18853 | 1298 | 2.2 × 10⁷ | 3.0 × 10⁻³ | 1.4 × 10⁻¹⁰ |
| Z18856 | 1330 | 4.6 × 10⁷ | 5.7 × 10⁻³ | 1.2 × 10⁻¹⁰ |
| Z18863 | 1362 | 2.2 × 10⁷ | 4.8 × 10⁻³ | 2.2 × 10⁻¹⁰ |
| Z18866 | 1324 | 3.6 × 10⁷ | 4.2 × 10⁻³ | 1.2 × 10⁻¹⁰ |
| Z18874 | 1421 | 4.9 × 10⁷ | 5.2 × 10⁻³ | 1.1 × 10⁻¹⁰ |
| Z18875 | 1420 | 2.4 × 10⁷ | 2.8 × 10⁻³ | 1.2 × 10⁻¹⁰ |
| Z18882 | 1311 | 1.2 × 10⁷ | 3.0 × 10⁻³ | 2.5 × 10⁻¹⁰ |
| Z18888 | 1422 | 1.8 × 10⁷ | 2.9 × 10⁻³ | 1.6 × 10⁻¹⁰ |
| Z18893 | 1353 | 8.6 × 10⁶ | 2.4 × 10⁻³ | 2.7 × 10⁻¹⁰ |
| Z18898 | 1285 | 6.7 × 10⁷ | 4.4 × 10⁻³ | 6.6 × 10⁻¹¹ |
| Z18912 | 1251 | 9.2 × 10⁷ | 1.9 × 10⁻² | 2.1 × 10⁻¹⁰ |
| Z18920 | 1270 | 3.6 × 10⁷ | 5.5 × 10⁻³ | 1.5 × 10⁻¹⁰ |
| Z18968 | 1472 | 3.0 × 10⁷ | 8.4 × 10⁻³ | 2.8 × 10⁻¹⁰ |
| Z19072 | 1554 | 4.3 × 10⁷ | 1.8 × 10⁻² | 4.1 × 10⁻¹⁰ |
| Z19075 | 1618 | 1.4 × 10⁷ | 6.4 × 10⁻³ | 4.5 × 10⁻¹⁰ |
| Z19143 | 1471 | 1.7 × 10⁷ | 3.9 × 10⁻³ | 2.2 × 10⁻¹⁰ |
| Z19147 | 1307 | 2.8 × 10⁷ | 4.3 × 10⁻³ | 1.5 × 10⁻¹⁰ |
| Z19151 | 1594 | 2.8 × 10⁷ | 7.0 × 10⁻³ | 2.5 × 10⁻¹⁰ |
| Z19158 | 1571 | 2.7 × 10⁷ | 4.4 × 10⁻³ | 1.6 × 10⁻¹⁰ |
| Z19159 | 1364 | 2.7 × 10⁷ | 5.0 × 10⁻³ | 1.9 × 10⁻¹⁰ |
| Z19170 | 1334 | 2.1 × 10⁷ | 4.3 × 10⁻³ | 2.0 × 10⁻¹⁰ |
| Z19172 | 1551 | 4.9 × 10⁷ | 2.3 × 10⁻² | 4.6 × 10⁻¹⁰ |
| Z19180 | 1393 | 2.2 × 10⁷ | 3.1 × 10⁻³ | 1.4 × 10⁻¹⁰ |
| Z19181 | 1549 | 2.0 × 10⁷ | 1.6 × 10⁻² | 8.2 × 10⁻¹⁰ |
| Z19182 | 1628 | 2.1 × 10⁷ | 5.5 × 10⁻³ | 2.6 × 10⁻¹⁰ |

[0387] In vitro IL-1B neutralization assay: The IL-1β inhibition ability of His₆-tagged IL-1R-I-binding Z variants was analyzed in a TF-1 cell assay. The resulting IC₅₀ values are presented in Table 20. The IC₅₀ values of Z12967, Z16065, Z16163 and Z18557 were 7.4, 3.3, 3.3 and 0.6 nM, respectively.

TABLE 20
IC₅₀ values for His₆-Z polypeptides from a TF-1 cell assay.

| Z variant | SEQ ID NO | IC₅₀ (nM) |
|---|---|---|
| Z15934 | 1208 | 6.4 |
| Z15975 | 1209 | 3.3 |
| Z18754 | 1252 | 0.6 |
| Z18760 | 1435 | 0.9 |
| Z18813 | 1375 | 1.2 |
| Z18814 | 1368 | 0.4 |
| Z18831 | 1308 | 0.4 |
| Z18832 | 1340 | 0.5 |
| Z18834 | 1361 | 0.5 |
| Z18846 | 1331 | 0.2 |
| Z18874 | 1421 | 0.3 |
| Z18912 | 1251 | 1 |
| Z18968 | 1472 | 1.4 |
| Z19072 | 1554 | 2.4 |
| Z19159 | 1364 | 1.2 |
| Z19172 | 1551 | 2 |
| Z19181 | 1549 | 4.6 |
| Z19182 | 1628 | 1.5 |

[0388] CD analysis: The CD spectra determined for the IL-1R-I binding Z variants with a Hiss tag showed that each had an α-helical structure at 20° C. This result was also verified in the variable temperature measurements, wherein melting temperatures were determined (Table 21). Reversible folding was seen for all the IL-1R-I binding Z variants when overlaying spectra measured before and after heating to 90° C.

[0389] The thermo-stability and the α-helical content of the IL-1R-I binding Z variants having a valine or isoleucine residue in position X₅ of the BM (Z18912, Z18920, Z18968, Z19072, Z19075, Z19143, Z19147, Z19151, Z19158, Z19159, Z19170, Z19172, Z19180, Z19181 and Z19182) were not substantially different from the Z variants having an alanine residue in position X₅.

TABLE 21
Melting temperatures (Tm).

| Z variant | SEQ ID NO | Tm (° C.) |
|---|---|---|
| Z15876 | 1206 | 55 |
| Z15932 | 1207 | 60 |
| Z15934 | 1208 | 62 |
| Z15975 | 1209 | 59 |
| Z18754 | 1252 | 63 |
| Z18760 | 435 | 57 |
| Z18762 | 1415 | 62 |
| Z18769 | 1339 | 59 |
| Z18770 | 1284 | 59 |
| Z18799 | 1423 | 60 |
| Z18800 | 1328 | 67 |
| Z18813 | 1375 | 61 |
| Z18814 | 1368 | 61 |
| Z18817 | 1343 | 60 |
| Z18823 | 1283 | 52 |
| Z18831 | 1308 | 58 |
| Z18832 | 1340 | 58 |
| Z18834 | 1361 | 58 |
| Z18846 | 1331 | 60 |
| Z18850 | 1367 | 62 |
| Z18853 | 1298 | 59 |
| Z18856 | 1330 | 61 |
| Z18863 | 1362 | 57 |
| Z18866 | 1324 | 61 |
| Z18874 | 1421 | 61 |
| Z18875 | 1420 | 61 |
| Z18882 | 1311 | 53 |
| Z18888 | 1422 | 61 |
| Z18893 | 1353 | 60 |
| Z18898 | 1285 | 59 |
| Z18912 | 1251 | 53 |
| Z18920 | 1270 | 56 |
| Z18968 | 1472 | 62 |
| Z19072 | 1554 | 63 |
| Z19075 | 1618 | 56 |
| Z19143 | 1471 | 56 |
| Z19147 | 1307 | 57 |
| Z19151 | 1594 | 59 |
| Z19158 | 1571 | 55 |
| Z19159 | 1364 | 54 |
| Z19170 | 1334 | 52 |
| Z19172 | 1551 | 59 |
| Z19180 | 1393 | 58 |
| Z19181 | 1549 | 61 |
| Z19182 | 1628 | 62 |

### Example 10

### Production and Characterization of IL-1R-I Binding Fusion Proteins

[0390] This Example describes the common steps for DNA construction and production of different IL-1R-I binding proteins variants fused to different in vivo half-life extending fusion partners.

### Materials and Methods

[0391] DNA construction: DNA encoding a set of IL-1R-I binding Z variants (see below) fused to human IgG1 Fc (SEQ ID NO:1662), an albumin binding polypeptide variant (PP013; SEQ ID NO:1661), human albumin (SEQ ID NO: 1663) or human transferrin (SEQ ID NO:1664), optionally via different linkers (Table 22), were codon optimized for expression in E. coli or for expression in Chinese hamster ovary (CHO) cells and synthesized by the Invitrogen GeneArt Gene Synthesis service at Thermo Fisher Scientific. The genes were cloned in expression vectors for subsequent expression in E. coli or in CHO cells.

[0392] The fusion proteins were based on the binding motifs of the IL-1R-I binding Z variants a) Z12967 (SEQ ID NO:9), b) Z12895 (SEQ ID NO:12), c) Z18831 (SEQ ID NO:1308), d) Z18846 (SEQ ID NO:1331), e) Z18754 (SEQ ID NO: 1252), f) Z19151 (SEQ ID NO:1594), g) Z18874 (SEQ ID NO:1421), h) Z18760 (SEQ ID NO:1435), i) Z18800 (SEQ ID NO:1328), j) Z18898 (SEQ ID NO: 1285) and k) Z19147 (SEQ ID NO:1307) and the different fusions partners described above. The IL-1R-I binding Z variants a)-k) contained different scaffold mutations, (positions 1, 2, 23, 52 and/or 53) or a deletion combined with mutations (deletion at positions 1-3; ΔV1D2A3, mutations in positions 52 and 53), see Table 22 below. The mutated Z variants are listed in FIGS. 1A-1BK as SEQ ID NO:1667-1668 and 1670-1679. These obtained fusion polypeptides were PSI0405 (SEQ ID NO:1639), PSI0407 (SEQ ID NO: 1640), PSI0411 (SEQ ID NO:1641), PSI0412 (SEQ ID NO:1642), PSI0415 (SEQ ID NO:1643), PSI0416 (SEQ ID NO:1644), PSI0417 (SEQ ID NO: 1645), PSI0534 (SEQ ID NO:1646), PSI0535 (SEQ ID NO:1647), PSI0536 (SEQ ID NO:1648), PSI0537 (SEQ ID NO:1649), PSI0538 (SEQ ID NO: 1650), PSI0539 (SEQ ID NO:1651), PSI0574 (SEQ ID NO:1652), PSI0575 (SEQ ID NO:1653), PSI0576 (SEQ ID NO:1654), PSI0580 (SEQ ID NO: 1655), PSI0581 (SEQ ID NO:1656), PSI0582 (SEQ ID NO:1657), see Table 22.

TABLE 22
Fusion proteins and expression systems

| | Fusion | | Expression |
|---|---|---|---|
| SEQ ID NO | proteins | Construct | system |
| 1639 | PSI0405 | Z12967[V1A; D2E; N52S; D53E]-VEGS-ABD | E. coli |
| 1640 | PSI0407 | Z12895[V1A; D2E; N52S; D53E]-VEGS-ABD | E. coli |
| 1641 | PSI0411 | AS-ABD-GS-Z12967[V1A; D2E; N52S; D53E] | E. coli |
| 1642 | PSI0412 | AS-ABD-(G₄S)₂- | E. coli |
| | | Z12967[V1A; D2E; N52S; D53E] | |
| 1643 | PSI0415 | AS-ABD-Z12967[V1A; D2E; N52S; D53E] | E. coli |
| 1644 | PSI0416 | AS-ABD-Z12967[ΔV1D2A3; N52S; D53E] | E. coli |
| 1645 | PSI0417 | AS-ABD-((KEAAA)₃KELAA)₂- | E. coli |
| | | Z12967[V1A; D2E; N52S; D53E] | |
| 1646 | PSI0534 | Z18831[V1A; D2E; N52S; D53E]-AS(G₄S)₂- | E. coli |
| | | IgG1 Fc | |
| 1647 | PSI0535 | Z18846[V1A; D2E; N52S; D53E]-AS(G₄S)₂- | E. coli |
| | | IgG1 Fc | |
| 1648 | PSI0536 | Z18754[V1A; D2E; N52S; D53E]-AS(G₄S)₂- | E. coli |
| | | IgG1 Fc | |
| 1649 | PSI0537 | Z19151[V1A; D2E; N52S; D53E]-AS(G₄S)₂- | E. coli |
| | | IgG1 Fc | |
| 1650 | PSI0538 | Z18874[V1A; D2E; N52S; D53E]-AS(G₄S)₂- | E. coli |
| | | IgG1 Fc | |
| 1651 | PSI0539 | Z18760[V1A; D2E; N52S; D53E]-AS(G₄S)₂- | E. coli |
| | | IgG1 Fc | |
| 1652 | PSI0574 | Z18800[V1A; D2E; N52S; D53E]-AS(G₄S)₂- | E. coli |
| | | IgG1 Fc | |
| 1653 | PSI0575 | Z18898[V1A; D2E; N52S; D53E]-AS(G₄S)₂- | E. coli |
| | | IgG1 Fc | |
| 1654 | PSI0576 | Z19147[V1A; D2E; N52S; D53E]-AS(G₄S)₂- | E. coli |
| | | IgG1 Fc | |
| 1655 | PSI0580 | Z18754[V1A; D2E; N52S; D53E]-AS(G₄S)₂- | CHO |
| | | Albumin | |
| 1656 | PSI0581 | Z18754[V1A; D2E; T23N; N52S; D53E]- | CHO |
| | | AS(G₄S)₂-Albumin | |
| 1657 | PSI0582 | Z18754[V1A; D2E; N52S; D53E]-AS(G₄S)₂- | CHO |
| | | Transferrin | |
| 1658 | PSI0589 | PSI0536[amino acids 1-86], dimeric | |

[0393] Cultivation and purification of fusion proteins: E. coli cells were transformed with expression vectors containing the gene fragments corresponding to the IL-1R-I binding fusion proteins, see Table 22, and then cultivated in bioreactors using fed-batch techniques or in shake flasks, followed by protein expression and harvest of cells by centrifugation. Cell pellets were stored at −20° C. Expression of IL-1R-I binding Z variants, see Table 22, were also performed using the ExpiCHO expression system (Thermo Fisher Scientific), essentially according to the manufacturer's protocol. Supernatants were harvested by centrifugation 12 days after transfection of expression vectors and stored at −70° C.

[0394] Frozen E. coli cell pellets were resuspended and then disrupted by sonication and the cell debris subsequently removed by centrifugation followed by filtration (0.22 μm). The frozen supernatants from the ExpiCHO cultures were thawed and filtrated (0.22 μm). Each supernatant, containing the IL-1R-I binding Z variants was purified using conventional chromatography methods, such as affinity chromatography, ion exchange chromatography, hydrophobic interaction chromatography and size exclusion chromatography. Z variants for use in animal studies were also subjected to an endotoxin removal purification using Detoxi-Gel Endotoxin Removing Columns (Pierce, cat. no. 20344). Purified Z variants were buffer exchanged to PBS and, unless otherwise stated, PBS was also the formulation buffer used in subsequent experiments. The purity of the IL-1R-I binding Z variants was analyzed by SDS-PAGE stained with Coomassie Blue and the molecular weight of each purified Z variant was analyzed using mass spectrometry (HPLC/MS or MALDI-TOF/MS).

[0395] The IL-1R-I binding fusion protein PSI0589 (SEQ ID NO:1658), a dimeric Z18754 variant linked in the hinge region by disulfides, was obtained by removing the IgG1 Fc part from PSI0536, see Table 22. This was achieved by incubation of purified PSI0536 with the IdeS protease (FabRICATOR, Genovis AB). The cleavage products were then purified using conventional chromatography methods such as ion exchange chromatography and affinity chromatography. The purified dimeric Z18754 variant was subjected to buffer exchange into PBS, which was also the formulation buffer used in subsequent experiments. The purity was analyzed by SDS-PAGE stained with Coomassie Blue and the molecular weight was analyzed using mass spectrometry (HPLC/MS or MALDI-TOF/MS).

[0396] Biolayer Interferometry (BLI) kinetic analysis: Binding of four IL-1R-I binding fusion proteins to human and cynomolgus IL-1R-I was analyzed using BLI. The Fc fused IL-1R-I binding Z variants denoted PSI0536, PSI0537, PSI0534 and PSI0535 (SEQ ID NO:1648, 1649, 1646, 1647) were loaded onto a Protein A sensor (Pall, ForteBio cat. no. 18-5010) at 0.5 μg/ml for 150 s in each cycle using an OctetRED96 instrument (Pall, ForteBio). Subsequently, these sensors were exposed to different and increasing concentrations of human IL-1R-I (R&D systems cat. no. 269-1R/CF) ranging from 0.15 to 5 nM or cynomolgus IL-1R-I (SEQ ID NO:1665) ranging from 2.5 to 80 nM. Association was recorded for 300 s and dissociation for 300 s (human) or 90 s (cynomolgus) and spectrograms were recorded and analyzed according to a 1:1 Langmuir model using global fit (Octet System Data Analysis 8.2 software, Pall, ForteBio). Each sensor was referenced to a sensor with the same ligand loaded onto it but exposed to buffer only. Following each association/dissociation cycle, all sensors were regenerated by three pulses of 10 mM glycine at pH 2.5 for 10 s each. All steps were carried out at 25° C. at a shaking speed of 1000 rpm and all dilutions of fusion proteins (Z-Fc fusion proteins) and analytes (human or cynomolgus IL-1R-I) were in 1×kinetics buffer (Pall, ForteBio).

### Results

[0397] Cultivation and purification: All the IL-1R-I binding fusion proteins (Table 22) were expressed to high levels in E. coli or CHO cells as soluble proteins. Purification resulted in protein preparations with high purity, which was analyzed by SDS-PAGE stained with Coomassie Blue. The correct identity and molecular weight of each Z variant were confirmed by mass spectrometry analysis.

[0398] BLI kinetic analysis: Four Z-Fc fusion protein variants (SEQ ID NO: 1648, 1649, 1646, 1647) were analyzed for the ability to bind human and cynomolgus IL-1R-I loaded onto protein A sensor using BLI technology on an OctetRED96 instrument. All four variants bound IL-1R-I according to a 1:1 model with B-max values ranging from 0.46 to 0.72 nm (human) or 0.31 to 0.37 nm (cynomolgus). The kinetic data; association rate constant (kₒₙ), dissociation rate constant (K_{off}) and dissociation constant K_{D} for the Z-Fc fusion protein variants are presented in Table 23.

TABLE 23
Kinetic parameters for IL-1R-I binding fusion proteins

| Fusion | | | | | | |
|---|---|---|---|---|---|---|
| proteins and | Human IL-1R-I | | | Cynomolgus IL-1R-I | | |
| SEQ ID NO | K_{D} (M) | kₒₙ (1/Ms) | k_{off} (1/s) | K_{D} (M) | kₒₙ (1/Ms) | k_{off} (1/s) |
| PSI0536 (SEQ | 7.5 × 10⁻¹⁰ | 8.99 × 10⁵ | 6.79 × 10⁻⁴ | 1.4 × 10⁻⁸ | 1.70 × 10⁶ | 2.34 × 10⁻² |
| ID NO: 1648) | | | | | | |
| PSI0537 (SEQ | 1.2 × 10⁻⁹ | 8.41 × 10⁵ | 1.02 × 10⁻³ | 3.1 × 10⁻⁸ | 1.78 × 10⁶ | 5.48 × 10⁻² |
| ID NO: 1649) | | | | | | |
| PSI0534 (SEQ | 1.6 × 10⁻⁹ | 4.04 × 10⁵ | 6.42 × 10⁻⁴ | 2.8 × 10⁻⁸ | 1.08 × 10⁶ | 2.99 × 10⁻² |
| ID NO: 1646) | | | | | | |
| PSI0535 (SEQ | 7.2 × 10⁻¹⁰ | 5.83 × 10⁵ | 4.21 × 10⁻⁴ | 1.1 × 10⁻⁸ | 1.49 × 10⁶ | 1.66 × 10⁻² |
| ID NO: 1647) | | | | | | |

### Example 11

### In Vitro Pharmacological Activity Analysis Using a Cell-Based Assay

### Materials and Methods

[0399] The inhibitory effect of IL-1R-I binding fusion proteins on IL-1B induced IL-6 production in Normal Human Dermal Fibroblasts (NHDF) cells was monitored.

[0400] Cells were seeded three days prior to treatment with proteins. Proteins (IL-1R-I binding fusion proteins or anakinra) were diluted to a starting concentration of 100 nM and subsequently serially 1:4 nine times resulting in a concentration range of 100 nM to 0.38 pM in serum-free growth medium in the presence of 9 UM recombinant human serum albumin (rHSA). The IL-1R-I binding fusion proteins or anakinra were tested in presence of a challenge dose of 3.4 pM IL-1B and the cells were incubated for 22 hours with proteins at 37° C., followed by harvesting of medium. Harvested medium was diluted 41×before IL-6 content was analyzed using a human IL-6 ELISA kit (R&D Systems) according to manufacturer's recommendations.

Data was analyzed using XLfit and IC₅₀ values were calculated from concentration-response curves.

[0401] The inhibitory effect of His₆-tagged IL-1R-I binding Z variants, produced as described in Example 9, on IL-1B induced IL-6 production in NHDF cells was similarly monitored and IC₅₀ values calculated.

[0402] Chemically synthesized protein: A chemically synthesized version of SEQ ID NO:1672, denoted PSI0558, was ordered from BACHEM AG. The activity of PSI0558 was assessed according to the method set out above.

### Results

[0403] The IL-1B induced IL-6 release from NHDF cells was reduced in a concentration-dependent manner by the IL-1R-I binding fusion proteins as well as by anakinra. Each IL-1R-I binding fusion protein was tested twice and the data from both experiments along with historical average of anakinra (n>20) in this assay are presented in Table 24 and one of the two experiments is also presented in FIG. 2.

TABLE 24
In vitro IC₅₀ values

| Denotation | SEQ ID NO | IC₅₀ (pM) |
|---|---|---|
| PSI0536 | 1648 | 66; 45 |
| PSI0537 | 1649 | 260; 200 |
| PSI0534 | 1646 | 140; 110 |
| PSI0535 | 1647 | 80; 50 |
| PSI0538 | 1650 | 87; 70 |
| PSI0539 | 1651 | 240; 110 |
| anakinra | | Average 70 |

Some IL-1R-I binding fusion proteins were tested in the same manner but only one time. The results from this experiment are presented in Table 25.

TABLE 25
In vitro IC₅₀ values

| Denotation | SEQ ID NO | IC₅₀ (pM) |
|---|---|---|
| PSI0589 | 1658 | 1.8 |
| PSI0582 | 1657 | 2.0 |
| PSI0580 | 1655 | 1500 |
| PSI0581 | 1656 | 1800 |

[0404] The IL-1B inhibition ability of His₆-tagged IL-1R-I-binding Z variants, previously demonstrated in a TF-1 cell assay (Example 9, Table 20), was confirmed in this NHDF assay (results not shown).

[0405] The IC₅₀ value of the chemically synthesized PSI0558 was 690 pM.

### Example 12

### In Vitro Pharmacological Activity Analysis Using a Whole Blood Assay

[0406] The inhibitory effect of IL-1R-I binding fusion proteins on IL-1B induced IL-6 production in whole blood from individual donors was measured.

### Materials and Methods

[0407] Blood from healthy donors was collected 1-3 hours prior to treatment with the IL-1R-I binding fusion proteins (SEQ ID NO:1648-1649). Proteins (IL-1R-I binding fusion proteins or anakinra) were diluted to starting concentration of 500 nM in serum free RPMI (ThermoFisher Scientific, RPMI 1640 Medium, GlutaMAX™ Supplement, Cat. No.: 61870010) and subsequently serially diluted 1:3 in a ten-step dilution series resulting in a concentration range of 500 nM to 25 pM. The IL-1R-I binding fusion polypetides or anakinra were tested in presence of a challenge dose of 100 pM IL-1B. The blood was incubated for 21-23 hours with proteins, followed by harvesting of plasma. Harvested plasma was diluted 2× and IL-6 content was analyzed by using a human IL-6 kit (V-PLEX Human IL-6 Kit Human interleukin-6, MSD) according to manufacturer's recommendations.

[0408] IL-6 concentrations (pg/ml) were calculated using a standard curve (provided by the kit) and data was analyzed using XLfit and IC₅₀ values were calculated from the concentration-response curves.

### Results

[0409] The IL-1B induced IL-6 release in human whole blood was reduced in a concentration-dependent manner by the IL-1R-I binding fusion proteins as well as by anakinra. IL-1R-I binding fusion proteins were tested in blood from five to six individual healthy donors and compared to anakinra data from ten individual blood donors (FIG. 3). The median IC₅₀ values were 0.32, 1.25 and 0.31 nM for SEQ ID NO:1648 (PSI0536), SEQ ID NO:1649 (PSI0537) and anakinra, respectively.

### Example 13

### In Vivo Pharmacokinetics of IL-IR-1 Binding Fusion Proteins in Rats

[0410] In this Example, the pharmacokinetics of IL-1R-1-binding fusion proteins (SEQ ID NO:1646-1651) were evaluated in a single dose study in male rats.

### Material and Methods

[0411] Fusion proteins: The IL-1R-I binding fusion proteins PSI0534, PSI0535, PSI0536, PSI0537, PSI0538 and PSI0539 (see Table 22, SEQ ID NO:1646-1651) were evaluated in this study. All six test items were constituted as a solution in 25 mM sodium phosphate and 125 mM sodium chloride, pH 7.0.

[0412] In-life phase: The pharmacokinetic properties of the six fusion proteins were investigated in male Sprague-Dawley rats. For each test item, three rats were given an i.v. single dose of 15 mg/kg (2.5 ml/kg) injected in the lateral tail vein and another three rats were given a s.c. single dose of 30 mg/kg (5 ml/kg) injected in the neck region. Blood samples for serum preparation were collected pre dosing and at 5 and 20 min, 1, 4, 8, 24, 48, 72 and 96 hrs post i.v. dosing, or 20 min, 1, 4, 8, 24, 48, 72, 96 and 120 hrs post s.c. dosing.

[0413] Quantitative ELISA: Determination of fusion protein levels in rat serum samples was performed by enzyme-linked immunosorbent assay (ELISA). The ELISA assay employed the quantitative sandwich enzyme immunoassay technique.

[0414] In brief; a goat polyclonal anti-Z antibody recognizing the Z variant domain of the IL-1R-I binding fusion protein (produced in house, Affibody AB) was coated onto a microplate. Unbound polyclonal antibody was washed away and casein was added as blocking agent to reduce unspecific binding to the plastic surface. After removal of unbound casein by a second wash step, standards and samples were pipetted to the wells and any fusion protein present was bound to the immobilized antibody. After washing away any unbound substances, a HRP labeled Swine anti-rabbit antibody (Dako, cat. no. P0399) was added. Following a wash to remove any unbound anti-rabbit HRP reagent, a substrate solution was added to the wells and color developed in proportion to the amount of fusion protein bound in the initial step. The color development was stopped and the intensity of the color was measured.

[0415] Pharmacokinetic analysis: The pharmacokinetic analysis was based on median serum concentration versus time data from each dose group. The observed maximum concentration (Cₘₐₓ) and the time to maximum serum concentration (tₘₐₓ) were taken directly from the bioanalytical data. Other pharmacokinetic parameters, i.e. clearance (CL), apparent clearance following s.c. administration (CL/F), apparent volume of distribution at steady-state (Vₛₛ), mean residence time (MRT) and terminal half-life (t_{1/2z}), were estimated by non-compartmental analysis using Phoenix WinNonlin software version 6.3 (Pharsight Corp., USA). Estimation of the terminal slope following i.v. dosing was based on four data points, from 24 to 96 hrs. Estimation of the terminal slope following s.c. dosing was based on five data points, from 24 to 120 hrs. Calculation of the subcutaneous bioavailability (F) was performed using Microsoft Excel.

### Results

[0416] There was no significant difference in the pharmacokinetics between the six tested fusion proteins. The pharmacokinetics following i.v. administration was characterized by a clearance in the order of 2.4 ml/h·kg and a volume of distribution of about 140 ml/kg, translating into a mean residence time of ca 60 hrs (Table 26).

TABLE 26
Pharmacokinetic parameter estimates following an intravenous
single dose administration, 15 mg/kg, to male rats

| Parameter | PSI0534 | PSI0535 | PSI0536 | PSI0537 | PSI0538 | PSI0539 |
|---|---|---|---|---|---|---|
| CL (ml/h · kg) | 2.83 | 2.40 | 2.68 | 2.06 | 2.36 | 2.03 |
| Vₛₛ (ml/kg) | 159 | 149 | 143 | 136 | 146 | 113 |
| MRT (hrs) | 56.4 | 62.1 | 53.5 | 65.9 | 61.6 | 55.5 |
| t_{1/2z} (hrs) | 48.7 | 52.1 | 44.7 | 55.1 | 50.4 | 48.3 |

The subcutaneous bioavailability was on average 50% and peak levels were observed at 24 hrs after dosing. The serum levels then declined with a half-life ranging from 45 to 59 hrs (Table 27).

TABLE 27
Pharmacokinetic parameter estimates following a subcutaneous
single dose administration, 30 mg/kg, to male rats

| Parameter | PSI0534 | PSI0535 | PSI0536 | PSI0537 | PSI0538 | PSI0539 |
|---|---|---|---|---|---|---|
| F (%) | 41.5 | 49.6 | 46.7 | 60.3 | 47.2 | 52.2 |
| Cₘₐₓ (nM) | 828 | 866 | 948 | 1115 | 796 | 886 |
| tₘₐₓ (hrs) | 24 | 24 | 24 | 24 | 24 | 24 |
| CL/F (ml/h · kg) | 6.81 | 5.70 | 6.05 | 4.69 | 5.98 | 5.42 |
| V_{z}/F (ml/kg) | 445 | 457 | 403 | 372 | 509 | 424 |
| t_{1/2z} (hrs) | 45.3 | 55.6 | 46.1 | 55.1 | 59.0 | 54.3 |
| MRT (hrs) | 72.4 | 87.3 | 74.5 | 87.4 | 91.7 | 86.2 |

### Example 14

### In Vivo Pharmacokinetics of an IL-1R-I Binding Fusion Protein in Monkeys

### Material and Methods

[0417] Fusion proteins: The IL-1R-I binding fusion protein denoted PSI0536 (SEQ ID NO:1648) was constituted as a solution in 25 mM sodium phosphate and 125 mM sodium chloride, pH 7.0.

[0418] In-life phase: The pharmacokinetic properties of PSI0536 were investigated in naïve male Cynomolgus monkeys. Three monkeys were given an i.v. single dose of 5 mg/kg (1 ml/kg) injected in the tail vein and another three monkeys were given a s.c. single dose of 10 mg/kg (1 ml/kg) injected in the dorsal region. Blood samples for serum preparation were collected pre dosing and at 5 and 20 min, 1, 2, 4, 8, 12, 24, 48, 72, 96, 120, 144, 168, 240 and 504 hrs post i.v. dosing, or 20 min, 1, 2, 4, 8, 12, 24, 48, 72, 96, 120, 144, 168, 240 and 504 hrs post s.c. dosing.

[0419] Quantitative ELISA: Quantification of PSI0536 in serum from monkeys was performed according to the ELISA described in Example 13.

[0420] Pharmacokinetic analysis: Pharmacokinetic parameters were based on individual serum concentration versus time data and determined using WinNonlin software as described in Example 13. Estimation of the terminal slope following i.v. dosing was based on seven data points, from 72 to 504 hrs. Estimation of the terminal slope following s.c. dosing was based on eight data points, from 48 to 504 hrs. Calculation of the subcutaneous bioavailability (F) was performed using Microsoft Excel.

### Results

[0421] The pharmacokinetics of PSI0536 (SEQ ID NO:1648) following i.v. administration was characterized by a low clearance (1.07 ml/h·kg) and a small volume of distribution (117 ml/kg), translating into a mean residence time of 109 hrs (Table 28).

TABLE 28
Mean (±SD) pharmacokinetic parameter estimates of
PSI0536 following an intravenous single dose of 5.04
(±0.01) mg/kg to three male monkeys

| Parameter | Estimate |
|---|---|
| CL (ml/h · kg) | 1.07 ± 0.04 |
| Vₛₛ (ml/kg) | 117 ± 3 |
| MRT (hrs) | 109 ± 1 |
| t_{1/2z} (hrs) | 92.7 ± 3.7 |

The mean subcutaneous bioavailability of PSI0536 was 73.9%. Peak levels were observed at an average of 18.7 hrs after dosing. The serum levels then declined with a half-life of 77.3 hrs (Table 29).

TABLE 29
Mean (±SD) pharmacokinetic parameter estimates
of PSI0536 following a subcutaneous single dose of
10.1 (±0.1) mg/kg to three male monkeys

| Parameter | Estimate |
|---|---|
| F (%) | 73.9 ± 5.5 |
| Cₘₐₓ (nM) | 779 ± 159 |
| tₘₐₓ (hrs) | 18.7 ± 7.5 |
| CL/F (ml/h · kg) | 1.46 ± 0.10 |
| V_{z}/F (ml/kg) | 163 ± 23 |
| t_{1/2z} (hrs) | 77.3 ± 6.3 |
| MRT (hrs) | 115 ± 14 |

### Conclusion

[0422] Assuming a minimum target serum concentration of 100 nM or even 200 nM, the high subcutaneous bioavailability in combination with the low clearance facilitates a once weekly subcutaneous dose regimen of 10 mg/kg PSI0536 in monkey.

### Example 15

Production and Characterization of IL-1-R-I Binding Fusion Proteins with Mutations in the Fc Portion

[0423] Four IL-1-R-I binding fusion proteins of the IL-1R-I binding polypeptide variant Z18754 (SEQ ID NO:1252) with mutated variants of the Fc portion of IgG1 or IgG4 were produced. In the IgG1 Fc portion, one mutation [N297A] was introduced in order to abolish effector functions through interaction with FCγR3A. Fc-containing polypeptides produced in mammalian cells might otherwise cause such effector functions. In addition, in one fusion protein (SEQ ID NO:1735) two other residues were introduced, denoted LS (WO2009/086320), to increase affinity to FcRn, and in another fusion protein (SEQ ID NO:1736) three mutations denoted YTE (WO02060919) were introduced to increase affinity to FcRn. One fusion protein of Z18754 (SEQ ID NO: 1252) with an IgG4 Fc a subtype, which is known to elicit low effector responses, was produced (SEQ ID NO:1737). One mutation, known as S228P (van der Neut Kolfschoten M. et al., 2007, Science 317 (5844): 1554-7), was furthermore introduced in the hinge region of this fusion protein. This mutation abolishes the arm exchange that may take place for the IgG4 subclass of antibodies.

### Material and Methods

[0424] The fusion proteins PSI0653-PSI0656 (SEQ ID NO:1734-1737), see Table 30 for specifications, were produced in CHO cells according to Example 10.

[0425] The inhibitory effect of IL-1R-I binding fusion proteins on IL-1β induced IL-6 production in Normal Human Dermal Fibroblasts (NHDF) cells was monitored as set out in Example 11.

[0426] The affinity towards FCγR3A was analysed with Biolayer Interferometry essentially as disclosed in Example 10, with the exception that biotinylated FCγR3A (Sino Biological) was immobilized on a Streptavidin biosensor for kinetics (Pall/Fortebio) and the proteins were tested using concentrations of 100 and 1000 nM. In addition Human IgG (GammaNorm, Octapharma) was used as control in the measurements.

[0427] The affinity towards FcRn was assessed using Biacore essentially as described in Example 9 with the exception that human biotinylated FcRn (Immunitrack ApS) was immobilized on a Biotin CAPture chip (GE Healthcare) and the analytes were tested in five concentrations, ranging from 2.5-200 nM.

TABLE 30
Fusion proteins and expression systems

| SEQ ID | Fusion | | Expression |
|---|---|---|---|
| NO | proteins | Construct | system |
| 1734 | PSI0653 | Z18754[N297A]-IgG1 Fc | CHO |
| 1735 | PSI0654 | Z18754[N297A]-LS-IgG1 Fc | CHO |
| 1736 | PSI0655 | Z18754[N297A]-YTE-IgG1 Fc | CHO |
| 1737 | PSI0656 | Z18754[S228P]-IgG4 Fc | CHO |

### Results

[0428] Cultivation and purification: All the IL-1-R-I binding fusion proteins with mutated Fc portions (Table 30) were expressed at high levels in CHO cells as soluble proteins. Purification resulted in protein preparations with high purity, which were analyzed by SDS-PAGE stained with Coomassie Blue. The correct identity and molecular weight of each Z variant were confirmed by mass spectrometry analysis.

[0429] In vitro pharmacological activity: The IL-1B induced IL-6 release from NHDF cells was reduced in a concentration-dependent manner by the IL-1R-I binding fusion proteins. The IL-1R-I binding fusion proteins were tested one time. The results from this experiment are accounted for in Table 31.

TABLE 31
In vitro IC₅₀ values

| SEQ ID NO: | Fusion proteins | IC₅₀ (pM) |
|---|---|---|
| 1734 | PSI0653 | 4.3 |
| 1735 | PSI0654 | 2.9 |
| 1736 | PSI0655 | 5.9 |
| 1737 | PSI0656 | 8.4 |

[0430] FCγR3A affinity analysis: Human IgG bound to FCγR3A with an affinity of 57 nM at 1000 nM concentration. The fusion proteins PSI0653-PSI0655 (SEQ ID NO 1734-1736) showed no binding at either concentration. PSI0656 (SEQ ID NO 1737) showed a weak binding at 1000 nM but no binding at 100 nM.

[0431] Biacore FcRn affinity analysis: The affinity towards FcRn were in the order SEQ ID NO 1735>SEQ ID NO 1736>SEQ ID NO 1734=SEQ ID NO 1737.

[0432] Conclusion: The mutated Fc variants of the fusion proteins (SEQ ID NO: 1734:1737) were equal to the previously produced proteins in terms of quality and activity (see Example 10). The removal of glycan attachment site removed the effector function of the IgG1 Fc portion in SEQ ID NO:1734-1736 as binding to FCγR3A was abolished. The IgG4 Fc containing SEQ ID NO: 1737 had low affinity towards FCγR3A as expected for an Fc of that subclass. The FcRn affinity enhancing mutations in SEQ ID NO:1735 and 1736 displayed increased affinity, with SEQ ID NO:1735 showing the greatest increase.

### Itemized Listing of Embodiments

[0433] 1. IL-1R-I binding polypeptide, comprising an IL-1R-I binding motif BM, which motif consists of an amino acid sequence selected from:

i)
(SEQ ID NO: 1686)
EX₂X₃X₄X₅X₆X₇EIX₁₀X₁₁LPNLX₁₆RX₁₈QYX₂₁AFIX₂₅X₂₆LX₂₈D

wherein, independently from each other,
[0434] X₂ is selected from A, D, E, F, H, I, L, Q, S, T and V;
[0435] X₃ is selected from A, D, E, F, H, I, K, L, N, Q, R, S, T, V, W and Y;
[0436] X₄ is selected from A, D, E, F, H, I, K, L, M, N, Q, R, S, T, V, W and Y;
[0437] X₅ is selected from A, I and V;
[0438] X₆ is selected from F, H, I, Q, R, T, V and Y;
[0439] X₇ is selected from A, D, E, F, G, H, I, L, M, Q, S, T, V, W and Y;
[0440] X₁₀ is selected from F and Y;
[0441] X₁₁ is selected from A, D, E, F, G, H, I, K, L, M, N, Q, R, S, T, V, W and Y;
[0442] X₁₆ is selected from N and T;
[0443] X₁₈ is selected from K, R and S;
[0444] X₂₁ is selected from Q, T and V;
[0445] X₂₅ is selected from I, M, R, V and Y;
[0446] X₂₆ is selected from K and S, and
[0447] X₂₈ is selected from F, I, L and M,
[0448] and
[0449] ii) an amino acid sequence which has at least 96% identity to the sequence defined in i) provided that X₅ is I or V.

[0450] 2. IL-1R-I binding polypeptide, wherein said IL-1R-I binding motif consists of an amino acid sequence selected from a sequence wherein in i)
[0451] X₂ is selected from A, I, L, T and V;
[0452] X₃ is selected from E and Y;
[0453] X₄ is selected from A, E, I, K, Q, R, T, V and Y;
[0454] X₅ is selected from I and V;
[0455] X₆ is selected from Q and Y;
[0456] X₇ is selected from F and M;
[0457] X₁₀ is selected from F and Y;
[0458] X₁₁ is selected from A, D, E, F, G, H, K, L, Q, R, S, T, V and Y;
[0459] X₁₆ is selected from N and T;
[0460] X₁₈ is selected from K and R;
[0461] X₂₁ is selected from T and V;
[0462] X₂₅ is selected from I and R;
[0463] X₂₆ is selected from K and S, and
[0464] X₂₈ is selected from F and L,
[0465] and an amino acid sequence which has at least 93% identity to the sequence defined in i).

[0466] 3. IL-1R-I binding polypeptide according to any one of the preceding items, wherein sequence i) fulfills at least five of the ten conditions I-X:
[0467] I. X₃ is E;
[0468] II. X₅ is selected from I and V;
[0469] III. X₆ is selected from Q and Y;
[0470] IV. X₇ is selected from F and M;
[0471] V. X₁₀ is selected from F and Y;
[0472] VI. X₁₈ is selected from K and R;
[0473] VII. X₂₁ is T;
[0474] VIII. X₂₅ is R;
[0475] IX. X₂₆ is selected from K and S; and
[0476] X. X₂₈ is selected from F and L.

[0477] 4. IL-1R-I binding polypeptide according to item 3, wherein sequence i) fulfills at least six of the ten conditions I-X.

[0478] 5. IL-1R-I binding polypeptide according to item 4, wherein sequence i) fulfills at least seven of the ten conditions I-X.

[0479] 6. IL-1R-I binding polypeptide according to item 5, wherein sequence i) fulfills at least eight of the ten conditions I-X.

[0480] 7. IL-1R-I binding polypeptide according to item 6, wherein sequence i) fulfills at least nine of the ten conditions I-X.

[0481] 8. IL-1R-I binding polypeptide according to item 7, wherein sequence i) fulfills all of the ten conditions I-X.

[0482] 9. IL-1R-I binding polypeptide according to any one of items 1-8, wherein X₂X₃X₆ is VEQ or VEY.

[0483] 10. IL-1R-I binding polypeptide according to any one of items 1-8, wherein X₂X₃X₆ is IEQ or VEQ.

[0484] 11. IL-1R-I binding polypeptide according to any one of items 1-8, wherein X₆X₁₀ is selected from the group consisting of QF, QY, YF and YY.

[0485] 12. IL-1R-I binding polypeptide according to any one of items 1-8, wherein X₆X₁₀ is QF.

[0486] 13. IL-1R-I binding polypeptide according to any one of items 1-8, wherein X₁₀X₁₈ is selected from the group consisting of FK, FR, YK and YR.

[0487] 14. IL-1R-I binding polypeptide according to any one of items 1-8, wherein X₁₀X₁₈ is FK or FR.

[0488] 15. IL-1R-I binding polypeptide according to any one of items 1-8, wherein X₁₈X₂₅X₂₈ is KRL or RRL.

[0489] 16. IL-1R-I binding polypeptide according to any one of items 1-8, wherein X₅X₇ is IM or VM.

[0490] 17. IL-1R-I binding polypeptide according to any preceding item, wherein sequence i) corresponds to the sequence from position 8 to position 36 in a sequence selected from the group consisting of SEQ ID NO:1-1632, and 1679, such as the group consisting of SEQ ID NO:20-1632, and 1679.

[0491] 18. IL-1R-I binding polypeptide according to any preceding item, wherein sequence i) corresponds to the sequence from position 8 to position 36 in a sequence selected from the group consisting of SEQ ID NO:1206-1632 and 1679, such as the group consisting of SEQ ID NO:1210-1632 and 1679.

[0492] 19. IL-1R-I binding polypeptide according to any preceding item, wherein sequence i) corresponds to the sequence from position 8 to position 36 in a sequence selected from the group consisting of SEQ ID NO:1252, 1285, 1307, 1308, 1328, 1331, 1415, 1421, 1435, 1594 and 1679, such as the group consisting of SEQ ID NO:1252, 1328, 1435 and 1679.

[0493] 20. IL-1R-I binding polypeptide according to item 19, wherein sequence i) corresponds to the sequence from position 8 to position 36 in SEQ ID NO:1252.

[0494] 21. IL-1R-I binding polypeptide according to item 19, wherein sequence i) corresponds to the sequence from position 8 to position 36 in SEQ ID NO:1328.

[0495] 22. IL-1R-I binding polypeptide according to item 19, wherein sequence i) corresponds to the sequence from position 8 to position 36 in SEQ ID NO:1435.

[0496] 23. IL-1R-I binding polypeptide according to any preceding item, wherein said IL-1R-I binding motif forms part of a three-helix bundle protein domain.

[0497] 24. IL-1R-I binding polypeptide according to item 23, wherein said IL-1R-I binding motif essentially forms part of two helices with an interconnecting loop, within said three-helix bundle protein domain.

[0498] 25. IL-1R-I binding polypeptide according to item 24, wherein said three-helix bundle protein domain is selected from bacterial receptor domains.

[0499] 26. IL-1R-I binding polypeptide according to item 25, wherein said three-helix bundle protein domain is selected from domains of protein A from Staphylococcus aureus or derivatives thereof.

[0500] 27. IL-1R-I binding polypeptide according to any preceding item, which comprises a binding module BMod, the amino acid sequence of which is selected from:

iii)
(SEQ ID NO: 1687)
K-[BM]-DPSQSXₐX_{b}LLX_{c}EAKKLX_{d}XₑX_{f}Q;

[0501] wherein
[0502] [BM] is an IL-1R-I binding motif as defined in any one of items 1-22;
[0503] Xₐ is selected from A and S;
[0504] X_{b} is selected from N and E;
[0505] X_{c} is selected from A, S and C;
[0506] X_{d} is selected from E, N and S;
[0507] Xₑ is selected from D, E and S;
[0508] X_{f} is selected from A and S; and
[0509] iv) an amino acid sequence which has at least 91% identity to a sequence defined by iii).

[0510] 28. IL-1R-I binding polypeptide according to any preceding item, wherein sequence iii) corresponds to the sequence from position 7 to position 55 in a sequence selected from the group consisting of SEQ ID NO:1-1638, 1667-1668 and 1670-1679; such as the group consisting of SEQ ID NO:20-1638 and 1670-1679.

[0511] 29. IL-1R-I binding polypeptide according to item 28, wherein sequence iii) corresponds to the sequence from position 7 to position 55 in a sequence selected from the group consisting of SEQ ID NO:1206-1632 and 1670-1679, such as the group consisting of SEQ ID NO:1210-1632 and 1670-1679.

[0512] 30. IL-1R-I binding polypeptide according to item 28, wherein sequence iii) corresponds to the sequence from position 7 to position 55 in a sequence selected from the group consisting of SEQ ID NO:1252, 1285, 1307, 1308, 1328, 1331, 1415, 1421, 1435, 1594 and 1670-1679, such as the group consisting of SEQ ID NO:1252, 1328, 1435, 1672, 1675-1676 and 1679.

[0513] 31. IL-1R-I binding polypeptide according to item 30, wherein sequence iii) corresponds to the sequence from position 7 to position 55 in SEQ ID NO:1672.

[0514] 32. IL-1R-I binding polypeptide according to item 30, wherein sequence iii) corresponds to the sequence from position 7 to position 55 in SEQ ID NO:1675.

[0515] 33. IL-1R-I binding polypeptide according to item 30, wherein sequence iii) corresponds to the sequence from position 7 to position 55 in SEQ ID NO:1676.

[0516] 34. IL-1R-I binding polypeptide according to any preceding item, which comprises an amino acid sequence selected from:

SEQ ID NO: 1695
ADNNFNK-[BM]DPSQSANLLSEAKKLNESQAPK;
SEQ ID NO: 1696
ADNKFNK-[BM]DPSQSANLLAEAKKLNDAQAPK;
SEQ ID NO: 1697
ADNKFNK-[BM]DPSVSKEILAEAKKLNDAQAPK;
SEQ ID NO: 1698
ADAQQNNFNK-[BM]DPSQSTNVLGEAKKLNESQAPK;
SEQ ID NO: 1699
AQHDE-[BM]DPSQSANVLGEAQKLNDSQAPK;
SEQ ID NO: 1700
VDNKFNK-[BM]DPSQSANLLAEAKKLNDAQAPK;
SEQ ID NO: 1701
AEAKYAK-[BM]DPSESSELLSEAKKLNKSQAPK;
SEQ ID NO: 1702
VDAKYAK-[BM]DPSQSSELLAEAKKLNDAQAPK;
SEQ ID NO: 1703
VDAKYAK-[BM]DPSQSSELLAEAKKLNDSQAPK;
SEQ ID NO: 1704
AEAKYAK-[BM]DPSQSSELLSEAKKLNDSQAPK;
SEQ ID NO: 1705
AEAKYAK-[BM]DPSQSSELLSEAKKLNDSQAP;
SEQ ID NO: 1706
AEAKFAK-[BM]DPSQSSELLSEAKKLNDSQAPK;
SEQ ID NO: 1707
AEAKFAK-[BM]DPSQSSELLSEAKKLNDSQAP;
SEQ ID NO: 1708
AEAKYAK-[BM]DPSQSSELLAEAKKLNDAQAPK;
SEQ ID NO: 1709
AEAKYAK-[BM]DPSQSSELLSEAKKLSESQAPK;
SEQ ID NO: 1710
AEAKYAK-[BM]DPSQSSELLSEAKKLSESQAP;
SEQ ID NO: 1711
AEAKFAK-[BM]DPSQSSELLSEAKKLSESQAPK;
SEQ ID NO: 1712
AEAKFAK-[BM]DPSQSSELLSEAKKLSESQAP;
SEQ ID NO: 1713
AEAKYAK-[BM]DPSQSSELLAEAKKLSEAQAPK;
SEQ ID NO: 1714
AEAKYAK-[BM]DPSQSSELLSEAKKLESSQAPK;
SEQ ID NO: 1715
AEAKYAK-[BM]DPSQSSELLSEAKKLESSQAP;
SEQ ID NO: 1716
AEAKYAK-[BM]DPSQSSELLAEAKKLESAQAPK;
SEQ ID NO: 1717
AEAKYAK-[BM]DPSQSSELLSEAKKLSDSQAPK;
SEQ ID NO: 1718
AEAKYAK-[BM]DPSQSSELLSEAKKLSDSQAP;
SEQ ID NO: 1719
AEAKYAK-[BM]DPSQSSELLAEAKKLSDSQAPK;
SEQ ID NO: 1720
AEAKYAK-[BM]DPSQSSELLAEAKKLSDAQAPK;
SEQ ID NO: 1721
VDAKYAK-[BM]DPSQSSELLSEAKKLNDSQAPK;
SEQ ID NO: 1722
VDAKYAK-[BM]DPSQSSELLAEAKKLNDAQAPK;
SEQ ID NO: 1723
VDAKYAK-[BM]DPSQSSELLSEAKKLSESQAPK;
SEQ ID NO: 1724
VDAKYAK-[BM]DPSQSSELLAEAKKLSEAQAPK;
SEQ ID NO: 1725
VDAKYAK-[BM]DPSQSSELLSEAKKLESSQAPK;
SEQ ID NO: 1726
VDAKYAK-[BM]DPSQSSELLAEAKKLESAQAPK;
SEQ ID NO: 1727
VDAKYAK-[BM]DPSQSSELLSEAKKLSDSQAPK;
SEQ ID NO: 1728
VDAKYAK-[BM]DPSQSSELLAEAKKLSDSQAPK;
SEQ ID NO: 1729
VDAKYAK-[BM]DPSQSSELLAEAKKLSDAQAPK;
SEQ ID NO: 1730
VDAKYAK-[BM]DPSQSSELLAEAKKLNKAQAPK;
SEQ ID NO: 1731
AEAKYAK-[BM]DPSQSSELLAEAKKLNKAQAPK,
and
SEQ ID NO: 1732
ADAKYAK-[BM]DPSQSSELLSEAKKLNDSQAPK,

wherein [BM] is an IL-1R-I binding motif as defined in any one of items 1-22.

[0517] 35. IL-1R-I binding polypeptide according to any one of items 1-34,

which comprises an amino acid sequence selected from:

xix)
(SEQ ID NO: 1721)
VDAKYAK-[BM]-DPSQSSELLSEAKKLNDSQAPK

[0518] wherein [BM] is an IL-1R-I binding motif as defined in any one of items 1-22; and
[0519] xx) an amino acid sequence which in the sequences flanking the BM has at least 89% identity to the sequence defined in xix).

[0520] 36. IL-1R-I binding polypeptide according to any one of items 1-34, which comprises an amino acid sequence selected from:

xxi)
(SEQ ID NO: 1709)
AEAKYAK-[BM]-DPSQSSELLSEAKKLSESQAPK;

[0521] wherein [BM] is an IL-1R-I binding motif as defined in any one of items 1-22; and
[0522] xxii) an amino acid sequence which in the sequences flanking the BM has at least 89% identity to the sequence defined in xxi).

[0523] 37. IL-1R-I binding polypeptide according to item 35 or 36, wherein sequence xix) or xxi) corresponds to the sequence from position 1 to position 58 in a sequence selected from the group consisting of SEQ ID NO:1-1632, 1667-1668 and 1670-1679; such as the group consisting of SEQ ID NO:20-1632, 1667-1668 and 1670-1679.

[0524] 38. IL-1R-I binding polypeptide according to item 37 wherein xix) or xxi) corresponds to the sequence from position 1 to position 58 in a sequence selected from the group consisting SEQ ID NO:1206-1632, 1667-1668 and 1670-1679, such as the group consisting of SEQ ID NO:1210-1632, 1667-1668 and 1670-1679.

[0525] 39. IL-1R-I binding polypeptide according to item 38, wherein sequence xix) or xxi) corresponds to the sequence from position 1 to position 58 in a sequence selected from the group consisting of SEQ ID NO:1252, 1285, 1307, 1308, 1328, 1331, 1415, 1421, 1435, 1594 and 1670-1679, such as the group consisting of SEQ ID NO:1252, 1328, 1435, 1672, 1675-1676 and 1679.

[0526] 40. IL-1R-I binding polypeptide according to item 39, wherein sequence xxi) corresponds to the sequence from position 1 to position 58 in SEQ ID NO:1672.

[0527] 41. IL-1R-I binding polypeptide according to item 39, wherein sequence xxi) corresponds to the sequence from position 1 to position 58 in SEQ ID NO:1675.

[0528] 42. IL-1R-I binding polypeptide according to item 39, wherein sequence xxi) corresponds to the sequence from position 1 to position 58 in SEQ ID NO:1676.

[0529] 43. IL-1R-I binding polypeptide according to any preceding item, which is capable of blocking IL-1R-I dependent signaling.

[0530] 44. IL-1R-I binding polypeptide according to item 43, wherein the half maximal inhibitory concentration (IC₅₀) of the blocking is at most 1×10⁻⁷ M, such as at most, 1×10⁻⁸ M, such as at most 1×10⁻⁹ M, such as at most 5×10⁻¹⁰ M.

[0531] 45. IL-1R-I binding polypeptide according to item 43 or 44, which is capable of blocking the interaction of IL-1R-I with IL-1 cytokines, such as the interaction of IL-1R-I with IL-1a and/or IL-1B.

[0532] 46. IL-1R-I binding polypeptide according to any preceding item which is capable of binding to IL-1R-I such that the EC₅₀ value of the interaction is at most 1×10⁻⁷ M, such as at most 1×10⁻⁸ M, such as at most 5×10⁻⁹ M, such as at most 1×10⁻¹⁰ M such as at most 5×10⁻¹⁰ M, such as at most 2×10⁻¹⁰ M.

[0533] 47. IL-1R-I binding polypeptide according to any preceding item which is capable of binding to IL-1R-I such that the K_{D} value of the interaction is at most 1×10⁻⁶ M, such as at most 1×10⁻⁷ M, such as at most 1×10⁻⁸ M, such as at most 1×10⁻⁹ M, such as at most 9×10⁻¹⁰.

[0534] 48. IL-1R-I binding polypeptide according to any one of items 43-47, wherein said IL-1R-I is human IL-1R-I or cynomolgus IL-1R-I, such as human IL-1R-I.

[0535] 49. IL-1R-I binding polypeptide according to any preceding item which comprises additional amino acids at the C-terminal and/or N-terminal end.

[0536] 50. IL-1R-I binding polypeptide according to item 49, wherein said additional amino acid(s) improve(s) production, purification, stabilization in vivo or in vitro, coupling or detection of the polypeptide.

[0537] 51. IL-1R-I binding polypeptide according to any preceding item in multimeric form, comprising at least two IL-1R-I binding polypeptide monomer units, the amino acid sequences of which are the same or different.

[0538] 52. IL-1R-I binding polypeptide according to item 51, wherein said IL-1R-I binding polypeptide monomer units are covalently coupled together.

[0539] 53. IL-1R-I binding polypeptide according to item 52, wherein the IL-1R-I binding polypeptide monomer units are expressed as a fusion protein.

[0540] 54. IL-1R-I binding polypeptide according to any one of items 51-53, in dimeric form.

[0541] 55. Fusion protein or conjugate comprising
[0542] a first moiety consisting of an IL-1R-I binding polypeptide according to any preceding item; and
[0543] a second moiety consisting of a polypeptide having a desired biological activity.

[0544] 56. Fusion protein or conjugate according to item 55, wherein said desired biological activity is a therapeutic activity.

[0545] 57. Fusion protein or conjugate according to item 55, wherein said desired biological activity is a binding activity.

[0546] 58. Fusion protein or conjugate according to item 55, wherein said desired biological activity is a binding activity modifying tissue distribution of said fusion protein or conjugate.

[0547] 59. Fusion protein or conjugate according to item 57, wherein said desired biological activity is an in vivo half-life increasing activity such that said second moiety increases in vivo half-life of the fusion protein or conjugate.

[0548] 60. Fusion protein or conjugate according to item 59, said in vivo half-life increasing activity is an albumin binding activity.

[0549] 61. Fusion protein or conjugate according to item 60, wherein said albumin binding activity is provided by the albumin binding domain of streptococcal protein G or a derivative thereof.

[0550] 62. Fusion protein or conjugate according to item 61, wherein said second moiety comprises a polypeptide having an amino acid sequence as set out in SEQ ID NO:1659-1661, such as SEQ ID NO:1661.

[0551] 63. Fusion protein or conjugate according to item 59, wherein said second moiety is serum albumin.

[0552] 64. Fusion protein or conjugate according to item 59, wherein said second moiety is an Fc portion of an antibody, such as an IgG1 Fc or an IgG4 Fc.

[0553] 65. Fusion protein or conjugate according to item 64, wherein said Fc is a mutated Fc which relative to an unmutated form of Fc displays improved affinity to FcRn and/or reduced effector response.

[0554] 66. Fusion protein or conjugate according to item 58 or 59, wherein said second moiety is transferrin.

[0555] 67. Fusion protein or conjugate according to any one of items 59-65, comprising a polypeptide having an amino acid sequence selected from the group consisting of SEQ ID NO:1639-1658 and 1734-1737, such as from the group consisting of SEQ ID NO:1646-1654 and 1734-1737.

[0556] 68. Fusion protein or conjugate according to item 57, wherein said binding activity acts to block a biological activity.

[0557] 69. Fusion protein or conjugate according to any one of items 55-68, further comprising at least one linker, said linker optionally being selected from the group consisting of flexible amino acid linkers, rigid amino acid linkers and cleavable amino acid linkers.

[0558] 70. Fusion protein or conjugate according item 69, wherein said linker is arranged between said first moiety and said second moiety.

[0559] 71. Fusion protein or conjugate according item 69, wherein said linker is arranged within said first moiety.

[0560] 72. Fusion protein or conjugate according item 69 or 70, wherein said linker is a flexible linker comprising at least one amino acid residue(s) selected from the group consisting of glycine, serine and alanine. 73. Fusion protein or conjugate according to item 72, wherein said linker is selected from the group consisting of GS, VDSS, VDGS, VEGS, ASGS, (GGGGS)₂ (SEQ ID NO:1683), AS(GGGGS)₂ (SEQ ID NO:1684) and ((KEAAA)₃KELAA)₂ (SEQ ID NO:1685).

[0561] 74. Fusion protein or conjugate according to item 73, wherein said linker is selected from a AS(GGGGS)₂ (SEQ ID NO:1684) and ((KEAAA)₃KELAA)₂ (SEQ ID NO:1685).

[0562] 75. A polynucleotide encoding a polypeptide or a fusion protein according to any one of items 1-74.

[0563] 76. Expression vector comprising a polynucleotide according to item 75.

[0564] 77. Host cell comprising an expression vector according to item 76.

[0565] 78. Method of producing a polypeptide according to any one of items 1-77, comprising
[0566] culturing a host cell according to item 77 under conditions permissive of expression of said polypeptide from said expression vector, and
[0567] isolating said polypeptide.

[0568] 79. Composition comprising an IL-1R-I binding polypeptide, fusion protein, or conjugate according to any one of items 1-74 and at least one pharmaceutically acceptable excipient or carrier.

[0569] 80. Composition according to item 79, further comprising at least one additional active agent, such as an agent selected from an immune response modifying agent and an anti-cancer agent.

[0570] 81. Composition according to item 79 or 80, wherein said fusion protein is a fusion protein according to any one of claims 59-67.

[0571] 82. IL-1R-I binding polypeptide, fusion protein, or conjugate according to any one of items 1-74 or a composition according to any one of items 79-81 for use as a medicament, a diagnostic agent and/or a prognostic agent.

[0572] 83. IL-1R-I binding polypeptide, fusion protein, conjugate or composition according to item 82 for use as a medicament.

[0573] 84. IL-1R-I binding polypeptide, fusion protein, conjugate or composition for use according to item 83, wherein said polypeptide, fusion protein, conjugate or composition modulates IL-1R-I function in vivo.

[0574] 85. IL-1R-I binding polypeptide, fusion protein, conjugate or composition according to item 82 for use as a diagnostic agent and/or a prognostic agent.

[0575] 86. IL-1R-I binding polypeptide, fusion protein, conjugate or composition for use according to any one of items 82-85, in the treatment, prognosis or diagnosis of an IL-1R-I related disorder.

[0576] 87. IL-1R-I binding polypeptide, fusion protein, conjugate or composition for use according to item 86, wherein said IL-1R-I related disorder is selected from the group consisting of inflammatory disease, auto-inflammatory syndromes, autoimmune disease, infectious disease, cardiovascular disease, ischaemic disease, cancer and diabetes.

[0577] 88. IL-1R-I binding polypeptide, fusion protein, conjugate or composition for use according to item 86 or 87, wherein said IL-1R-I related disorder is selected from the group consisting of familial Mediterranean fever (FMF); cryopyrin-associated periodic syndrome (CAPS); TNF receptor-associated periodic syndrome (TRAPS); hyper-IgD syndrome (HIDS); periodic fever; aphthous stomatitis; pharyngitis; adenitis (PFAPA); rheumatoid arthritis (RA), juvenile RA, juvenile idiopathic arthritis, systemic juvenile idiopathic arthritis; adult-onset Still's disease; Schnitzler syndrome; Muckle Wells Syndrome; macrophage activation syndrome; Behçet's disease; uveitis; acne vulgaris; pyoderma gangrenosum; gout; type 2 diabetes, new-onset diabetes; dry eye syndrome; hidradenitis suppurativa; neutrophilic dermatoses, in particular cytophagic histiocytic panniculitis, Weber-Christian disease, and neutrophilic panniculitis; cardiovascular disease, myocardial infarction, stroke; liver failure, kidney failure; acute lung injury; pseudogout, calcium-pyrophosphate deposition disorder, chondrocalcinosis, deficiency of the IL-1 receptor antagonist (DIRA), deficiency of the IL-36 receptor antagonist (DITRA), ADAM2 deficiency (DADA2), pyogenic arthritis, pyoderma gangrenosum and acne (PAPA) syndrome, pyoderma gangrenosum, acne and suppurative hidradenitis (PASH) syndrome, PAPA and suppurative hidradenitis (PAPASH) syndrome, autoinflammatory syndrome with lymphedema (AISLE), Phospholipase C-gamma-2 mutation autoinflammatory syndrome, NALP12-associated periodic syndrome (NAPS12), mevalonate kinase deficiency (MKD), psoriatic arthritis, reactive arthritis, ankylosing spondylitis, haemochromatosis-related arthritis, periarticular calcinosis, osteoarthritis, inflammatory osteoarthritis, hand osteoarthritis, pustular psoriasis such as generalised pustular psoriasis (GPP), palmoplantar pustulosis (PPP), acrodermatitis continua of Hallopeau (ACH); Blau syndrome; Sweet syndrome; various vasculitides such as giant-cell arteritis (GCA), polymyalgia rheumatica (PMR), Takayasu arteritis, Kawasaki disease, urticarial vasculitis, and Henoch-Schönlein purpura (HSP); neutrophilic urticaria and idiopathic cold urticaria; lichen planus; polymyositis, dermatomyositis, juvenile dermatomyositis and inclusion-body myositis; various stages of myeloma such as smoldering myeloma (SMM), indolent myeloma, Waldenstrom's macroglobulinemia, and multiple myeloma; tumor-induced cachexia; solid tumor growth; neonatal disorders such as bronchopulmonary dysplasia (prophylaxis), necrotising enterocolitis (NEC), retinopathy of prematurity (ROP), cerebral palsy due to perinatal cerebral ischemia, and infant respiratory distress syndrome (IRDS); Whipple's disease; traumatic brain injury; refractory epilepsy; systemic inflammatory response syndrome (SIRS); cutaneous lupus; Jessner-Kanof disease; amyotrophic lateral sclerosis; systemic sclerosis (scleroderma); septic shock; acute pancreatitis; chronic recurrent multifocal osteomyelitis, non-bacterial osteitis (NBO), synovitis, acne, pustulosis, hyperostosis, osteitis (SAPHO) syndrome, and Majeed syndrome; relapsing polychondritis; idiopathic recurrent pericarditis (IRP); myocarditis; Erdheim-Chester disease; juvenile xantogranuloma; islet-cell transplantation; haemodialysis-induced systemic inflammation; graft-versus-host disease; ANCA-associated glomerulonephritis and recurrent glomerulonephritis; Cogan syndrome; autoimmune inner-ear disease; chronic granulomatous disease (CGD); Castleman's disease; cardiac failure; diastolic cardiac failure; antisynthetase syndrome; acute ACL injury; acute haemorrhagic leukoencephalitis; AA amyloidosis; Di George syndrome; generalised fatigue; chronic fatigue syndrome (CFS); gulf-war illness (GWI); and narcolepsy.

[0578] 89. IL-1R-I binding polypeptide, fusion protein, conjugate or composition for use according to item 87, wherein said IL-1R-I related disorder is cancer, such as a cancer selected from the group consisting of multiple myeloma, colon cancer, breast cancer, lung cancer, head and neck cancer, melanoma and prostate cancer.

[0579] 90. IL-1R-I binding polypeptide, fusion protein, conjugate or composition for use according to any one of items 82-89, wherein said IL-1R-I binding polypeptide, fusion protein, conjugate or composition is administered repeatedly within a 24 hour period from disease onset, such as at least two times within a 24 hour period from disease onset, such as at least three times within a 24 hour period from disease onset, such as continuously during 24 hours from disease onset, to a subject in need thereof.

[0580] 91. Fusion protein, conjugate or composition for use according to any one of items 82-84, 86-89, wherein said fusion protein or conjugate is a fusion protein or conjugate according to any one of items 58-67 and said composition is a composition according to item 81.

[0581] 92. Fusion protein, conjugate or composition for use according to item 91, wherein said fusion protein, conjugate or composition is administered once weekly to a subject in need thereof.

[0582] 93. Method of treatment of an IL-1R-I related disorder, comprising administering to a subject in need thereof an effective amount of an IL-1R-I binding polypeptide, fusion protein or conjugate according to any one of items 1-74 or a composition according to any one of items 79-81.

[0583] 94. Method according to item 93, wherein said IL-1R-I related disorder is selected from the group consisting inflammatory disease, auto-inflammatory syndrome, autoimmune disease, infectious disease, cardiovascular disease, ischaemic disease, cancer and diabetes.

[0584] 95. Method according to item 93 or 94, wherein said IL-1R-I related disorder is selected from the group as defined in item 88.

[0585] 96. Method according to item 94, wherein said IL-1R-I related disorder is cancer, such as a cancer selected from the group consisting of selected from the group consisting of multiple myeloma, colon cancer, breast cancer, lung cancer, head and neck cancer, melanoma and prostate cancer.

[0586] 97. Method according to any one of items 93-96, wherein said IL-1R-I binding polypeptide, fusion protein or conjugate or composition is administered repeatedly within a 24 h period from disease onset, such as at least two times within a 24 hour period from disease onset, such as at least three times within a 24 hour period from disease onset, such as continuously during 24 hours from disease onset, to a subject in need thereof.

[0587] 98. Method according to any one of claims 93-96, wherein said fusion protein or conjugate is a fusion protein or conjugate according to any one of items 59-67 and said composition is a composition according to item 81.

[0588] 99. Method according to item 97, wherein said fusion protein, conjugate or composition is administered once weekly to a subject in need thereof.

The application's sequence listing, which the Patent Office published only in electronic form, follows.

SEQUENCE LISTING (1737 sequences)

SEQ ID NO: 1 - protein, 58 aa, synthetic construct
  REGION 1..58: note = Engineered IL-1R-I binding polypeptide
VDAKYAKEAEDATMEIYNLPNLTRRQYVAFIIKLLDDPSQSSELLSEAKKLNDSQAPK

SEQ ID NO: 2 - protein, 58 aa, synthetic construct
  REGION 1..58: note = Engineered IL-1R-I binding polypeptide
VDAKYAKEAKTAQIEIYDLPNLTRRQYVAFIRKLLDDPSQSSELLSEAKKLNDSQAPK

SEQ ID NO: 3 - protein, 58 aa, synthetic construct
  REGION 1..58: note = Engineered IL-1R-I binding polypeptide
VDAKYAKEDEQAQLEIFNLPNLTRRQYTAFIRKLLDDPSQSSELLSEAKKLNDSQAPK

SEQ ID NO: 4 - protein, 58 aa, synthetic construct
  REGION 1..58: note = Engineered IL-1R-I binding polypeptide
VDAKYAKEVLYAYWEIFALPNLTRKQYTAFIRKLMDDPSQSSELLSEAKKLNDSQAPK

SEQ ID NO: 5 - protein, 58 aa, synthetic construct
  REGION 1..58: note = Engineered IL-1R-I binding polypeptide
VDAKYAKEVKWAHHEIFQLPNLTRKQYTAFIVKLFDDPSQSSELLSEAKKLNDSQAPK

SEQ ID NO: 6 - protein, 58 aa, synthetic construct
  REGION 1..58: note = Engineered IL-1R-I binding polypeptide
VDAKYAKEAHNAQQEIYRLPNLTRRQYTAFIIKLLDDPSQSSELLSEAKKLNDSQAPK

SEQ ID NO: 7 - protein, 58 aa, synthetic construct
  REGION 1..58: note = Engineered IL-1R-I binding polypeptide
VDAKYAKEARAAQGEIYALPNLTRRQYTAFIMKLLDDPSQSSELLSEAKKLNDSQAPK

SEQ ID NO: 8 - protein, 58 aa, synthetic construct
  REGION 1..58: note = Engineered IL-1R-I binding polypeptide
VDAKYAKEADHAQQEIFALPNLTRRQYTAFIIKLLDDPSQSSELLSEAKKLNDSQAPK

SEQ ID NO: 9 - protein, 58 aa, synthetic construct
  REGION 1..58: note = Engineered IL-1R-I binding polypeptide
VDAKYAKEAHRAQMEIFALPNLTRRQYTAFIRKLLDDPSQSSELLSEAKKLNDSQAPK

SEQ ID NO: 10 - protein, 58 aa, synthetic construct
  REGION 1..58: note = Engineered IL-1R-I binding polypeptide
VDAKYAKEALLAQQEIFALPNLTRRQYTAFIRKLLDDPSQSSELLSEAKKLNDSQAPK

SEQ ID NO: 11 - protein, 58 aa, synthetic construct
  REGION 1..58: note = Engineered IL-1R-I binding polypeptide
VDAKYAKEALSAQQEIFALPNLTRSQYTAFIRKLLDDPSQSSELLSEAKKLNDSQAPK

SEQ ID NO: 12 - protein, 58 aa, synthetic construct
  REGION 1..58: note = Engineered IL-1R-I binding polypeptide
VDAKYAKEALSAQQEIFALPNLTRRQYTAFIRKLLDDPSQSSELLSEAKKLNDSQAPK

SEQ ID NO: 13 - protein, 58 aa, synthetic construct
  REGION 1..58: note = Engineered IL-1R-I binding polypeptide
VDAKYAKEASLAQHEIFALPNLTRKQYTAFIRKLFDDPSQSSELLSEAKKLNDSQAPK

SEQ ID NO: 14 - protein, 58 aa, synthetic construct
  REGION 1..58: note = Engineered IL-1R-I binding polypeptide
VDAKYAKEAVYARDEIYLLPNLTRKQYTAFIRKLFDDPSQSSELLSEAKKLNDSQAPK

SEQ ID NO: 15 - protein, 58 aa, synthetic construct
  REGION 1..58: note = Engineered IL-1R-I binding polypeptide
VDAKYAKEARQAYAEIYLLPNLTRRQYTAFIRKLLDDPSQSSELLSEAKKLNDSQAPK

SEQ ID NO: 16 - protein, 58 aa, synthetic construct
  REGION 1..58: note = Engineered IL-1R-I binding polypeptide
VDAKYAKEARSAYAEIYGLPNLTRRQYTAFIIKLLDDPSQSSELLSEAKKLNDSQAPK

SEQ ID NO: 17 - protein, 58 aa, synthetic construct
  REGION 1..58: note = Engineered IL-1R-I binding polypeptide
VDAKYAKEQADAYAEIYSLPNLTRKQYVAFIRKLIDDPSQSSELLSEAKKLNDSQAPK

SEQ ID NO: 18 - protein, 58 aa, synthetic construct
  REGION 1..58: note = Engineered IL-1R-I binding polypeptide
VDAKYAKEHEKAILEIFHLPNLTRRQYTAFIRKLLDDPSQSSELLSEAKKLNDSQAPK

SEQ ID NO: 19 - protein, 58 aa, synthetic construct
  REGION 1..58: note = Engineered IL-1R-I binding polypeptide
VDAKYAKEQSQAYHEIFKLPNLTRRQYTAFIMKLLDDPSQSSELLSEAKKLNDSQAPK

SEQ ID NO: 20 - protein, 58 aa, synthetic construct
  REGION 1..58: note = Engineered IL-1R-I binding polypeptide
VDAKYAKEVTDAQLEIFALPNLTRKQYTAFIIKLLDDPSQSSELLSEAKKLNDSQAPK

SEQ ID NO: 21 - protein, 58 aa, synthetic construct
  REGION 1..58: note = Engineered IL-1R-I binding polypeptide
VDAKYAKEVEEAQMEIFELPNLTRKQYTAFIRKLLDDPSQSSELLSEAKKLNDSQAPK

SEQ ID NO: 22 - protein, 58 aa, synthetic construct
  REGION 1..58: note = Engineered IL-1R-I binding polypeptide
VDAKYAKEVESAQMEIFYLPNLTRKQYTAFIRKLLDDPSQSSELLSEAKKLNDSQAPK

SEQ ID NO: 23 - protein, 58 aa, synthetic construct
  REGION 1..58: note = Engineered IL-1R-I binding polypeptide
VDAKYAKEVDEAYMEIYRLPNLTRKQYTAFIRKLLDDPSQSSELLSEAKKLNDSQAPK

SEQ ID NO: 24 - protein, 58 aa, synthetic construct
  REGION 1..58: note = Engineered IL-1R-I binding polypeptide
VDAKYAKELENAYMEIYLLPNLTRKQYTAFIRKLLDDPSQSSELLSEAKKLNDSQAPK

SEQ ID NO: 25 - protein, 58 aa, synthetic construct
  REGION 1..58: note = Engineered IL-1R-I binding polypeptide
VDAKYAKELESAYMEIFNLPNLTRKQYTAFIRKLLDDPSQSSELLSEAKKLNDSQAPK

SEQ ID NO: 26 - protein, 58 aa, synthetic construct
  REGION 1..58: note = Engineered IL-1R-I binding polypeptide
VDAKYAKEVEEAQMEIFGLPNLTRRQYTAFIRKLLDDPSQSSELLSEAKKLNDSQAPK

SEQ ID NO: 27 - protein, 58 aa, synthetic construct
  REGION 1..58: note = Engineered IL-1R-I binding polypeptide
VDAKYAKETEDAQMEIFALPNLTRKQYTAFIRKLFDDPSQSSELLSEAKKLNDSQAPK

SEQ ID NO: 28 - protein, 58 aa, synthetic construct
  REGION 1..58: note = Engineered IL-1R-I binding polypeptide
VDAKYAKEVEQAQMEIYNLPNLTRKQYTAFIRKLFDDPSQSSELLSEAKKLNDSQAPK

SEQ ID NO: 29 - protein, 58 aa, synthetic construct
  REGION 1..58: note = Engineered IL-1R-I binding polypeptide
VDAKYAKEAYVAQMEIFALPNLTRRQYTAFIRKLLDDPSQSSELLSEAKKLNDSQAPK

SEQ ID NO: 30 - protein, 58 aa, synthetic construct
  REGION 1..58: note = Engineered IL-1R-I binding polypeptide
VDAKYAKEAYNAQMEIFGLPNLTRKQYTAFIRKLLDDPSQSSELLSEAKKLNDSQAPK

SEQ ID NO: 31 - protein, 58 aa, synthetic construct
  REGION 1..58: note = Engineered IL-1R-I binding polypeptide
VDAKYAKELEEAQMEIFYLPNLTRKQYTAFIRKLLDDPSQSSELLSEAKKLNDSQAPK

SEQ ID NO: 32 - protein, 58 aa, synthetic construct
  REGION 1..58: note = Engineered IL-1R-I binding polypeptide
VDAKYAKEIEAAQMEIFTLPNLTRKQYTAFIRKLLDDPSQSSELLSEAKKLNDSQAPK

SEQ ID NO: 33 - protein, 58 aa, synthetic construct
  REGION 1..58: note = Engineered IL-1R-I binding polypeptide
VDAKYAKEVEQAQMEIFALPNLTRRQYTAFIRKLLDDPSQSSELLSEAKKLNDSQAPK

SEQ ID NO: 34 - protein, 58 aa, synthetic construct
  REGION 1..58: note = Engineered IL-1R-I binding polypeptide
VDAKYAKEIEEAQMEIFALPNLTRKQYTAFIRKLFDDPSQSSELLSEAKKLNDSQAPK

SEQ ID NO: 35 - protein, 58 aa, synthetic construct
  REGION 1..58: note = Engineered IL-1R-I binding polypeptide
VDAKYAKETYNAQMEIFALPNLTRKQYTAFIRKLFDDPSQSSELLSEAKKLNDSQAPK

SEQ ID NO: 36 - protein, 58 aa, synthetic construct
  REGION 1..58: note = Engineered IL-1R-I binding polypeptide
VDAKYAKEVERAQMEIFDLPNLTRRQYTAFIRKLFDDPSQSSELLSEAKKLNDSQAPK

SEQ ID NO: 37 - protein, 58 aa, synthetic construct
  REGION 1..58: note = Engineered IL-1R-I binding polypeptide
VDAKYAKEIESAQMEIYYLPNLTRKQYTAFIRKLLDDPSQSSELLSEAKKLNDSQAPK

SEQ ID NO: 38 - protein, 58 aa, synthetic construct
  REGION 1..58: note = Engineered IL-1R-I binding polypeptide
VDAKYAKEVHAAQMEIFYLPNLTRKQYTAFIRKLFDDPSQSSELLSEAKKLNDSQAPK

SEQ ID NO: 39 - protein, 58 aa, synthetic construct
  REGION 1..58: note = Engineered IL-1R-I binding polypeptide
VDAKYAKETYEAQMEIFKLPNLTRKQYTAFIRKLLDDPSQSSELLSEAKKLNDSQAPK

SEQ ID NO: 40 - protein, 58 aa, synthetic construct
  REGION 1..58: note = Engineered IL-1R-I binding polypeptide
VDAKYAKEIEDAYMEIYGLPNLTRKQYTAFIRKLLDDPSQSSELLSEAKKLNDSQAPK

SEQ ID NO: 41 - protein, 58 aa, synthetic construct
  REGION 1..58: note = Engineered IL-1R-I binding polypeptide
VDAKYAKEAERAQMEIFDLPNLTRKQYTAFIRKLLDDPSQSSELLSEAKKLNDSQAPK

SEQ ID NO: 42 - protein, 58 aa, synthetic construct
  REGION 1..58: note = Engineered IL-1R-I binding polypeptide
VDAKYAKEVEIAQMEIFYLPNLTRRQYTAFIRKLLDDPSQSSELLSEAKKLNDSQAPK

SEQ ID NO: 43 - protein, 58 aa, synthetic construct
  REGION 1..58: note = Engineered IL-1R-I binding polypeptide
VDAKYAKEVEFAQMEIFKLPNLTRKQYTAFIRKLFDDPSQSSELLSEAKKLNDSQAPK

SEQ ID NO: 44 - protein, 58 aa, synthetic construct
  REGION 1..58: note = Engineered IL-1R-I binding polypeptide
VDAKYAKEVITAQMEIFYLPNLTRKQYTAFIRKLLDDPSQSSELLSEAKKLNDSQAPK

SEQ ID NO: 45 - protein, 58 aa, synthetic construct
  REGION 1..58: note = Engineered IL-1R-I binding polypeptide
VDAKYAKEIEEAQMEIYALPNLTRKQYTAFIRKLLDDPSQSSELLSEAKKLNDSQAPK

SEQ ID NO: 46 - protein, 58 aa, synthetic construct
  REGION 1..58: note = Engineered IL-1R-I binding polypeptide
VDAKYAKETEAAQMEIFSLPNLTRKQYTAFIRKLLDDPSQSSELLSEAKKLNDSQAPK

SEQ ID NO: 47 - protein, 58 aa, synthetic construct
  REGION 1..58: note = Engineered IL-1R-I binding polypeptide
VDAKYAKEIENAQMEIYYLPNLTRKQYTAFIRKLFDDPSQSSELLSEAKKLNDSQAPK

SEQ ID NO: 48 - protein, 58 aa, synthetic construct
  REGION 1..58: note = Engineered IL-1R-I binding polypeptide
VDAKYAKETVEAYEEIFHLPNLTRKQYTAFIRKLLDDPSQSSELLSEAKKLNDSQAPK

SEQ ID NO: 49 - protein, 58 aa, synthetic construct
  REGION 1..58: note = Engineered IL-1R-I binding polypeptide
VDAKYAKEVEVAQMEIFALPNLTRKQYTAFIRKLLDDPSQSSELLSEAKKLNDSQAPK

SEQ ID NO: 50 - protein, 58 aa, synthetic construct
  REGION 1..58: note = Engineered IL-1R-I binding polypeptide
VDAKYAKEVEDAYMEIYALPNLTRKQYTAFIRKLLDDPSQSSELLSEAKKLNDSQAPK

SEQ ID NO: 51 - protein, 58 aa, synthetic construct
  REGION 1..58: note = Engineered IL-1R-I binding polypeptide
VDAKYAKEIEVAQMEIFSLPNLTRKQYTAFIRKLLDDPSQSSELLSEAKKLNDSQAPK

SEQ ID NO: 52 - protein, 58 aa, synthetic construct
  REGION 1..58: note = Engineered IL-1R-I binding polypeptide
VDAKYAKEVEQAQMEIYGLPNLTRKQYTAFIRKLLDDPSQSSELLSEAKKLNDSQAPK

SEQ ID NO: 53 - protein, 58 aa, synthetic construct
  REGION 1..58: note = Engineered IL-1R-I binding polypeptide
VDAKYAKEVDQAYMEIYRLPNLTRKQYTAFIRKLLDDPSQSSELLSEAKKLNDSQAPK

SEQ ID NO: 54 - protein, 58 aa, synthetic construct
  REGION 1..58: note = Engineered IL-1R-I binding polypeptide
VDAKYAKEVEDAQMEIFKLPNLTRKQYTAFIRKLLDDPSQSSELLSEAKKLNDSQAPK

SEQ ID NO: 55 - protein, 58 aa, synthetic construct
  REGION 1..58: note = Engineered IL-1R-I binding polypeptide
VDAKYAKEIEEAQMEIFSLPNLTRKQYTAFIRKLLDDPSQSSELLSEAKKLNDSQAPK

SEQ ID NO: 56 - protein, 58 aa, synthetic construct
  REGION 1..58: note = Engineered IL-1R-I binding polypeptide
VDAKYAKEVYVAQMEIFGLPNLTRKQYTAFIRKLFDDPSQSSELLSEAKKLNDSQAPK

SEQ ID NO: 57 - protein, 58 aa, synthetic construct
  REGION 1..58: note = Engineered IL-1R-I binding polypeptide
VDAKYAKEIEEAQMEIFRLPNLTRKQYTAFIRKLFDDPSQSSELLSEAKKLNDSQAPK

SEQ ID NO: 58 - protein, 58 aa, synthetic construct
  REGION 1..58: note = Engineered IL-1R-I binding polypeptide
VDAKYAKEVEHAQMEIFYLPNLTRKQYTAFIRKLLDDPSQSSELLSEAKKLNDSQAPK

SEQ ID NO: 59 - protein, 58 aa, synthetic construct
  REGION 1..58: note = Engineered IL-1R-I binding polypeptide
VDAKYAKEIEIAQMEIFALPNLTRKQYTAFIRKLFDDPSQSSELLSEAKKLNDSQAPK

SEQ ID NO: 60 - protein, 58 aa, synthetic construct
  REGION 1..58: note = Engineered IL-1R-I binding polypeptide
VDAKYAKEVVEAYQEIFQLPNLTRKQYTAFIRKLLDDPSQSSELLSEAKKLNDSQAPK

SEQ ID NO: 61 - protein, 58 aa, synthetic construct
  REGION 1..58: note = Engineered IL-1R-I binding polypeptide
VDAKYAKEAEFAQMEIFELPNLTRRQYTAFIRKLLDDPSQSSELLSEAKKLNDSQAPK

SEQ ID NO: 62 - protein, 58 aa, synthetic construct
  REGION 1..58: note = Engineered IL-1R-I binding polypeptide
VDAKYAKEVELAQMEIFGLPNLTRKQYTAFIRKLLDDPSQSSELLSEAKKLNDSQAPK

SEQ ID NO: 63 - protein, 58 aa, synthetic construct
  REGION 1..58: note = Engineered IL-1R-I binding polypeptide
VDAKYAKEVEVAQMEIYGLPNLTRRQYTAFIRKLLDDPSQSSELLSEAKKLNDSQAPK

SEQ ID NO: 64 - protein, 58 aa, synthetic construct
  REGION 1..58: note = Engineered IL-1R-I binding polypeptide
VDAKYAKEIESAQMEIFNLPNLTRKQYTAFIRKLLDDPSQSSELLSEAKKLNDSQAPK

SEQ ID NO: 65 - protein, 58 aa, synthetic construct
  REGION 1..58: note = Engineered IL-1R-I binding polypeptide
VDAKYAKEVERAQFEIFALPNLTRKQYTAFIRKLFDDPSQSSELLSEAKKLNDSQAPK

SEQ ID NO: 66 - protein, 58 aa, synthetic construct
  REGION 1..58: note = Engineered IL-1R-I binding polypeptide
VDAKYAKEVKEAQDEIFALPNLTRKQYTAFIRKLFDDPSQSSELLSEAKKLNDSQAPK

SEQ ID NO: 67 - protein, 58 aa, synthetic construct
  REGION 1..58: note = Engineered IL-1R-I binding polypeptide
VDAKYAKEVEKAQMEIFNLPNLTRKQYTAFIRKLFDDPSQSSELLSEAKKLNDSQAPK

SEQ ID NO: 68 - protein, 58 aa, synthetic construct
  REGION 1..58: note = Engineered IL-1R-I binding polypeptide
VDAKYAKEVEFAQMEIFRLPNLTRKQYTAFIRKLLDDPSQSSELLSEAKKLNDSQAPK

SEQ ID NO: 69 - protein, 58 aa, synthetic construct
  REGION 1..58: note = Engineered IL-1R-I binding polypeptide
VDAKYAKEVEQAQMEIFALPNLTRKQYTAFIRKLFDDPSQSSELLSEAKKLNDSQAPK

SEQ ID NO: 70 - protein, 58 aa, synthetic construct
  REGION 1..58: note = Engineered IL-1R-I binding polypeptide
VDAKYAKEVENAQMEIFALPNLTRRQYTAFIRKLLDDPSQSSELLSEAKKLNDSQAPK

SEQ ID NO: 71 - protein, 58 aa, synthetic construct
  REGION 1..58: note = Engineered IL-1R-I binding polypeptide
VDAKYAKEVEIAQMEIFALPNLTRKQYTAFIRKLLDDPSQSSELLSEAKKLNDSQAPK

SEQ ID NO: 72 - protein, 58 aa, synthetic construct
  REGION 1..58: note = Engineered IL-1R-I binding polypeptide
VDAKYAKEIESAQMEIFALPNLTRKQYTAFIRKLLDDPSQSSELLSEAKKLNDSQAPK

SEQ ID NO: 73 - protein, 58 aa, synthetic construct
  REGION 1..58: note = Engineered IL-1R-I binding polypeptide
VDAKYAKEIENAQMEIFALPNLTRKQYTAFIRKLLDDPSQSSELLSEAKKLNDSQAPK

SEQ ID NO: 74 - protein, 58 aa, synthetic construct
  REGION 1..58: note = Engineered IL-1R-I binding polypeptide
VDAKYAKEIEDAQMEIYYLPNLTRKQYTAFIRKLLDDPSQSSELLSEAKKLNDSQAPK

SEQ ID NO: 75 - protein, 58 aa, synthetic construct
  REGION 1..58: note = Engineered IL-1R-I binding polypeptide
VDAKYAKELEKAQMEIYRLPNLTRRQYTAFIRKLFDDPSQSSELLSEAKKLNDSQAPK

SEQ ID NO: 76 - protein, 58 aa, synthetic construct
  REGION 1..58: note = Engineered IL-1R-I binding polypeptide
VDAKYAKETYEAQMEIFALPNLTRKQYTAFIRKLLDDPSQSSELLSEAKKLNDSQAPK

SEQ ID NO: 77 - protein, 58 aa, synthetic construct
  REGION 1..58: note = Engineered IL-1R-I binding polypeptide
VDAKYAKEVEWAQMEIFALPNLTRKQYTAFIRKLLDDPSQSSELLSEAKKLNDSQAPK

SEQ ID NO: 78 - protein, 58 aa, synthetic construct
  REGION 1..58: note = Engineered IL-1R-I binding polypeptide
VDAKYAKEVQAAQYEIFALPNLTRKQYTAFIRKLLDDPSQSSELLSEAKKLNDSQAPK

SEQ ID NO: 79 - protein, 58 aa, synthetic construct
  REGION 1..58: note = Engineered IL-1R-I binding polypeptide
VDAKYAKEVEYAQMEIFFLPNLTRKQYTAFIRKLLDDPSQSSELLSEAKKLNDSQAPK

SEQ ID NO: 80 - protein, 58 aa, synthetic construct
  REGION 1..58: note = Engineered IL-1R-I binding polypeptide
VDAKYAKEVELAYFEIYALPNLTRKQYTAFIRKLLDDPSQSSELLSEAKKLNDSQAPK

SEQ ID NO: 81 - protein, 58 aa, synthetic construct
  REGION 1..58: note = Engineered IL-1R-I binding polypeptide
VDAKYAKEVEKAQMEIFALPNLTRKQYTAFIRKLFDDPSQSSELLSEAKKLNDSQAPK

SEQ ID NO: 82 - protein, 58 aa, synthetic construct
  REGION 1..58: note = Engineered IL-1R-I binding polypeptide
VDAKYAKEAEIAQMEIFALPNLTRKQYTAFIRKLLDDPSQSSELLSEAKKLNDSQAPK

SEQ ID NO: 83 - protein, 58 aa, synthetic construct
  REGION 1..58: note = Engineered IL-1R-I binding polypeptide
VDAKYAKEVEKAYYEIFALPNLTRKQYTAFIRKLLDDPSQSSELLSEAKKLNDSQAPK

SEQ ID NO: 84 - protein, 58 aa, synthetic construct
  REGION 1..58: note = Engineered IL-1R-I binding polypeptide
VDAKYAKELEDAYFEIYYLPNLTRKQYTAFIRKLLDDPSQSSELLSEAKKLNDSQAPK

SEQ ID NO: 85 - protein, 58 aa, synthetic construct
  REGION 1..58: note = Engineered IL-1R-I binding polypeptide
VDAKYAKEVEEAQMEIFYLPNLTRKQYTAFIRKLLDDPSQSSELLSEAKKLNDSQAPK

SEQ ID NO: 86 - protein, 58 aa, synthetic construct
  REGION 1..58: note = Engineered IL-1R-I binding polypeptide
VDAKYAKEAADAYQEIFQLPNLTRKQYTAFIRKLLDDPSQSSELLSEAKKLNDSQAPK

SEQ ID NO: 87 - protein, 58 aa, synthetic construct
  REGION 1..58: note = Engineered IL-1R-I binding polypeptide
VDAKYAKEVEIAQMEIFGLPNLTRKQYTAFIRKLFDDPSQSSELLSEAKKLNDSQAPK

SEQ ID NO: 88 - protein, 58 aa, synthetic construct
  REGION 1..58: note = Engineered IL-1R-I binding polypeptide
VDAKYAKEVEIAQMEIFSLPNLTRKQYTAFIRKLLDDPSQSSELLSEAKKLNDSQAPK

SEQ ID NO: 89 - protein, 58 aa, synthetic construct
  REGION 1..58: note = Engineered IL-1R-I binding polypeptide
VDAKYAKEIEKAQMEIFRLPNLTRKQYTAFIRKLFDDPSQSSELLSEAKKLNDSQAPK

SEQ ID NO: 90 - protein, 58 aa, synthetic construct
  REGION 1..58: note = Engineered IL-1R-I binding polypeptide
VDAKYAKEVEEAQMEIFGLPNLTRKQYTAFIRKLFDDPSQSSELLSEAKKLNDSQAPK

SEQ ID NO: 91 - protein, 58 aa, synthetic construct
  REGION 1..58: note = Engineered IL-1R-I binding polypeptide
VDAKYAKETEIAQMEIFGLPNLTRKQYTAFIRKLLDDPSQSSELLSEAKKLNDSQAPK

SEQ ID NO: 92 - protein, 58 aa, synthetic construct
  REGION 1..58: note = Engineered IL-1R-I binding polypeptide
VDAKYAKEIHDAQMEIFGLPNLTRKQYTAFIRKLFDDPSQSSELLSEAKKLNDSQAPK

SEQ ID NO: 93 - protein, 58 aa, synthetic construct
  REGION 1..58: note = Engineered IL-1R-I binding polypeptide
VDAKYAKETEKAQMEIFGLPNLTRKQYTAFIRKLFDDPSQSSELLSEAKKLNDSQAPK

SEQ ID NO: 94 - protein, 58 aa, synthetic construct
  REGION 1..58: note = Engineered IL-1R-I binding polypeptide
VDAKYAKEVERAQMEIFALPNLTRKQYTAFIRKLLDDPSQSSELLSEAKKLNDSQAPK

SEQ ID NO: 95 - protein, 58 aa, synthetic construct
  REGION 1..58: note = Engineered IL-1R-I binding polypeptide
VDAKYAKEVKEAQMEIFVLPNLTRKQYTAFIRKLLDDPSQSSELLSEAKKLNDSQAPK

SEQ ID NO: 96 - protein, 58 aa, synthetic construct
  REGION 1..58: note = Engineered IL-1R-I binding polypeptide
VDAKYAKEVEDAQMEIFSLPNLTRKQYTAFIRKLLDDPSQSSELLSEAKKLNDSQAPK

SEQ ID NO: 97 - protein, 58 aa, synthetic construct
  REGION 1..58: note = Engineered IL-1R-I binding polypeptide
VDAKYAKEVEAAQMEIFSLPNLTRKQYTAFIRKLLDDPSQSSELLSEAKKLNDSQAPK

SEQ ID NO: 98 - protein, 58 aa, synthetic construct
  REGION 1..58: note = Engineered IL-1R-I binding polypeptide
VDAKYAKEAEKAYFEIYELPNLTRKQYTAFIRKLLDDPSQSSELLSEAKKLNDSQAPK

SEQ ID NO: 99 - protein, 58 aa, synthetic construct
  REGION 1..58: note = Engineered IL-1R-I binding polypeptide
VDAKYAKEIDKAYMEIFRLPNLTRKQYTAFIRKLLDDPSQSSELLSEAKKLNDSQAPK

SEQ ID NO: 100 - protein, 58 aa, synthetic construct
  REGION 1..58: note = Engineered IL-1R-I binding polypeptide
VDAKYAKETEYAQMEIFNLPNLTRKQYTAFIRKLLDDPSQSSELLSEAKKLNDSQAPK

SEQ ID NO: 101 - protein, 58 aa, synthetic construct
  REGION 1..58: note = Engineered IL-1R-I binding polypeptide
VDAKYAKEVEQAQMEIFHLPNLTRKQYTAFIRKLLDDPSQSSELLSEAKKLNDSQAPK

SEQ ID NO: 102 - protein, 58 aa, synthetic construct
  REGION 1..58: note = Engineered IL-1R-I binding polypeptide
VDAKYAKEVEIAQMEIFILPNLTRKQYTAFIRKLLDDPSQSSELLSEAKKLNDSQAPK

SEQ ID NO: 103 - protein, 58 aa, synthetic construct
  REGION 1..58: note = Engineered IL-1R-I binding polypeptide
VDAKYAKEIEQAQMEIFGLPNLTRKQYTAFIRKLLDDPSQSSELLSEAKKLNDSQAPK

SEQ ID NO: 104 - protein, 58 aa, synthetic construct
  REGION 1..58: note = Engineered IL-1R-I binding polypeptide
VDAKYAKELDEAYMEIFGLPNLTRKQYTAFIRKLLDDPSQSSELLSEAKKLNDSQAPK

SEQ ID NO: 105 - protein, 58 aa, synthetic construct
  REGION 1..58: note = Engineered IL-1R-I binding polypeptide
VDAKYAKETENAQMEIFALPNLTRKQYTAFIRKLLDDPSQSSELLSEAKKLNDSQAPK

SEQ ID NO: 106 - protein, 58 aa, synthetic construct
  REGION 1..58: note = Engineered IL-1R-I binding polypeptide
VDAKYAKEVESAQMEIFGLPNLTRKQYTAFIRKLFDDPSQSSELLSEAKKLNDSQAPK

SEQ ID NO: 107 - protein, 58 aa, synthetic construct
  REGION 1..58: note = Engineered IL-1R-I binding polypeptide
VDAKYAKEIENAQMEIFNLPNLTRKQYTAFIRKLFDDPSQSSELLSEAKKLNDSQAPK

SEQ ID NO: 108 - protein, 58 aa, synthetic construct
  REGION 1..58: note = Engineered IL-1R-I binding polypeptide
VDAKYAKEVIDAQMEIFNLPNLTRKQYTAFIRKLLDDPSQSSELLSEAKKLNDSQAPK

SEQ ID NO: 109 - protein, 58 aa, synthetic construct
  REGION 1..58: note = Engineered IL-1R-I binding polypeptide
VDAKYAKELYEAQMEIFALPNLTRKQYTAFIRKLFDDPSQSSELLSEAKKLNDSQAPK

SEQ ID NO: 110 - protein, 58 aa, synthetic construct
  REGION 1..58: note = Engineered IL-1R-I binding polypeptide
VDAKYAKEVETAQMEIFALPNLTRKQYTAFIRKLLDDPSQSSELLSEAKKLNDSQAPK

SEQ ID NO: 111 - protein, 58 aa, synthetic construct
  REGION 1..58: note = Engineered IL-1R-I binding polypeptide
VDAKYAKEVEFAQMEIYALPNLTRRQYTAFIRKLLDDPSQSSELLSEAKKLNDSQAPK

SEQ ID NO: 112 - protein, 58 aa, synthetic construct
  REGION 1..58: note = Engineered IL-1R-I binding polypeptide
VDAKYAKEVEEAQQEIFQLPNLTRKQYTAFIRKLFDDPSQSSELLSEAKKLNDSQAPK

SEQ ID NO: 113 - protein, 58 aa, synthetic construct
  REGION 1..58: note = Engineered IL-1R-I binding polypeptide
VDAKYAKEVESAQMEIYNLPNLTRRQYTAFIRKLLDDPSQSSELLSEAKKLNDSQAPK

SEQ ID NO: 114 - protein, 58 aa, synthetic construct
  REGION 1..58: note = Engineered IL-1R-I binding polypeptide
VDAKYAKETEQAQMEIFALPNLTRKQYTAFIRKLFDDPSQSSELLSEAKKLNDSQAPK

SEQ ID NO: 115 - protein, 58 aa, synthetic construct
  REGION 1..58: note = Engineered IL-1R-I binding polypeptide
VDAKYAKELEAAYFEIYELPNLTRKQYTAFIRKLLDDPSQSSELLSEAKKLNDSQAPK

SEQ ID NO: 116 - protein, 58 aa, synthetic construct
  REGION 1..58: note = Engineered IL-1R-I binding polypeptide
VDAKYAKEVEEAYMEIYNLPNLTRRQYTAFIRKLLDDPSQSSELLSEAKKLNDSQAPK

SEQ ID NO: 117 - protein, 58 aa, synthetic construct
  REGION 1..58: note = Engineered IL-1R-I binding polypeptide
VDAKYAKEVEVAYMEIYSLPNLTRKQYTAFIRKLLDDPSQSSELLSEAKKLNDSQAPK

SEQ ID NO: 118 - protein, 58 aa, synthetic construct
  REGION 1..58: note = Engineered IL-1R-I binding polypeptide
VDAKYAKEIEQAQMEIFALPNLTRKQYTAFIRKLFDDPSQSSELLSEAKKLNDSQAPK

SEQ ID NO: 119 - protein, 58 aa, synthetic construct
  REGION 1..58: note = Engineered IL-1R-I binding polypeptide
VDAKYAKEIEVAQMEIFALPNLTRKQYTAFIRKLLDDPSQSSELLSEAKKLNDSQAPK

SEQ ID NO: 120 - protein, 58 aa, synthetic construct
  REGION 1..58: note = Engineered IL-1R-I binding polypeptide
VDAKYAKEVEAAQMEIFVLPNLTRKQYTAFIRKLLDDPSQSSELLSEAKKLNDSQAPK

SEQ ID NO: 121 - protein, 58 aa, synthetic construct
  REGION 1..58: note = Engineered IL-1R-I binding polypeptide
VDAKYAKEVEAAQMEIYYLPNLTRKQYTAFIRKLLDDPSQSSELLSEAKKLNDSQAPK

SEQ ID NO: 122 - protein, 58 aa, synthetic construct
  REGION 1..58: note = Engineered IL-1R-I binding polypeptide
VDAKYAKEVETAQLEIFALPNLTRKQYTAFIRKLLDDPSQSSELLSEAKKLNDSQAPK

SEQ ID NO: 123 - protein, 58 aa, synthetic construct
  REGION 1..58: note = Engineered IL-1R-I binding polypeptide
VDAKYAKEAENAQMEIFSLPNLTRRQYTAFIRKLLDDPSQSSELLSEAKKLNDSQAPK

SEQ ID NO: 124 - protein, 58 aa, synthetic construct
  REGION 1..58: note = Engineered IL-1R-I binding polypeptide
VDAKYAKEIERAQHEIFNLPNLTRRQYTAFIRKLFDDPSQSSELLSEAKKLNDSQAPK

SEQ ID NO: 125 - protein, 58 aa, synthetic construct
  REGION 1..58: note = Engineered IL-1R-I binding polypeptide
VDAKYAKEVEEAQMEIFSLPNLTRKQYTAFIRKLFDDPSQSSELLSEAKKLNDSQAPK

SEQ ID NO: 126 - protein, 58 aa, synthetic construct
  REGION 1..58: note = Engineered IL-1R-I binding polypeptide
VDAKYAKELEAAQMEIFSLPNLTRKQYTAFIRKLFDDPSQSSELLSEAKKLNDSQAPK

SEQ ID NO: 127 - protein, 58 aa, synthetic construct
  REGION 1..58: note = Engineered IL-1R-I binding polypeptide
VDAKYAKEVVSAQMEIFALPNLTRKQYTAFIRKLFDDPSQSSELLSEAKKLNDSQAPK

SEQ ID NO: 128 - protein, 58 aa, synthetic construct
  REGION 1..58: note = Engineered IL-1R-I binding polypeptide
VDAKYAKEVEDAQMEIYSLPNLTRKQYTAFIRKLLDDPSQSSELLSEAKKLNDSQAPK

SEQ ID NO: 129 - protein, 58 aa, synthetic construct
  REGION 1..58: note = Engineered IL-1R-I binding polypeptide
VDAKYAKEVEEAQMEIFQLPNLTRKQYTAFIRKLLDDPSQSSELLSEAKKLNDSQAPK

SEQ ID NO: 130 - protein, 58 aa, synthetic construct
  REGION 1..58: note = Engineered IL-1R-I binding polypeptide
VDAKYAKEIEKAQMEIFKLPNLTRRQYTAFIRKLFDDPSQSSELLSEAKKLNDSQAPK

SEQ ID NO: 131 - protein, 58 aa, synthetic construct
  REGION 1..58: note = Engineered IL-1R-I binding polypeptide
VDAKYAKETYYAQMEIFTLPNLTRKQYTAFIRKLFDDPSQSSELLSEAKKLNDSQAPK

SEQ ID NO: 132 - protein, 58 aa, synthetic construct
  REGION 1..58: note = Engineered IL-1R-I binding polypeptide
VDAKYAKETYEAQMEIFALPNLTRRQYTAFIRKLLDDPSQSSELLSEAKKLNDSQAPK

SEQ ID NO: 133 - protein, 58 aa, synthetic construct
  REGION 1..58: note = Engineered IL-1R-I binding polypeptide
VDAKYAKEIEEAQMEIFELPNLTRKQYTAFIRKLLDDPSQSSELLSEAKKLNDSQAPK

SEQ ID NO: 134 - protein, 58 aa, synthetic construct
  REGION 1..58: note = Engineered IL-1R-I binding polypeptide
VDAKYAKEVQEAQMEIFALPNLTRKQYTAFIRKLFDDPSQSSELLSEAKKLNDSQAPK

SEQ ID NO: 135 - protein, 58 aa, synthetic construct
  REGION 1..58: note = Engineered IL-1R-I binding polypeptide
VDAKYAKEIEEAQMEIFYLPNLTRKQYTAFIRKLLDDPSQSSELLSEAKKLNDSQAPK

SEQ ID NO: 136 - protein, 58 aa, synthetic construct
  REGION 1..58: note = Engineered IL-1R-I binding polypeptide
VDAKYAKELEAAYMEIYYLPNLTRKQYTAFIRKLLDDPSQSSELLSEAKKLNDSQAPK

SEQ ID NO: 137 - protein, 58 aa, synthetic construct
  REGION 1..58: note = Engineered IL-1R-I binding polypeptide
VDAKYAKETERAQMEIFALPNLTRRQYTAFIRKLLDDPSQSSELLSEAKKLNDSQAPK

SEQ ID NO: 138 - protein, 58 aa, synthetic construct
  REGION 1..58: note = Engineered IL-1R-I binding polypeptide
VDAKYAKEIEHAQMEIFALPNLTRKQYTAFIRKLLDDPSQSSELLSEAKKLNDSQAPK

SEQ ID NO: 139 - protein, 58 aa, synthetic construct
  REGION 1..58: note = Engineered IL-1R-I binding polypeptide
VDAKYAKEVEDAQMEIFALPNLTRRQYTAFIRKLLDDPSQSSELLSEAKKLNDSQAPK

SEQ ID NO: 140 - protein, 58 aa, synthetic construct
  REGION 1..58: note = Engineered IL-1R-I binding polypeptide
VDAKYAKEVEAAQMEIFALPNLTRKQYTAFIRKLLDDPSQSSELLSEAKKLNDSQAPK

SEQ ID NO: 141 - protein, 58 aa, synthetic construct
  REGION 1..58: note = Engineered IL-1R-I binding polypeptide
VDAKYAKEVVAAYQEIYQLPNLTRRQYTAFIRKLLDDPSQSSELLSEAKKLNDSQAPK

SEQ ID NO: 142 - protein, 58 aa, synthetic construct
  REGION 1..58: note = Engineered IL-1R-I binding polypeptide
VDAKYAKETYAAQMEIFNLPNLTRKQYTAFIRKLFDDPSQSSELLSEAKKLNDSQAPK

SEQ ID NO: 143 - protein, 58 aa, synthetic construct
  REGION 1..58: note = Engineered IL-1R-I binding polypeptide
VDAKYAKEVEQAQMEIFALPNLTRKQYTAFIRKLLDDPSQSSELLSEAKKLNDSQAPK

SEQ ID NO: 144 - protein, 58 aa, synthetic construct
  REGION 1..58: note = Engineered IL-1R-I binding polypeptide
VDAKYAKEIEKAQMEIYQLPNLTRKQYTAFIRKLFDDPSQSSELLSEAKKLNDSQAPK

SEQ ID NO: 145 - protein, 58 aa, synthetic construct
  REGION 1..58: note = Engineered IL-1R-I binding polypeptide
VDAKYAKEAEVAYFEIYKLPNLTRKQYTAFIRKLLDDPSQSSELLSEAKKLNDSQAPK

SEQ ID NO: 146 - protein, 58 aa, synthetic construct
  REGION 1..58: note = Engineered IL-1R-I binding polypeptide
VDAKYAKEAIDAYDEIYALPNLTRKQYTAFIRKLLDDPSQSSELLSEAKKLNDSQAPK

SEQ ID NO: 147 - protein, 58 aa, synthetic construct
  REGION 1..58: note = Engineered IL-1R-I binding polypeptide
VDAKYAKEVEDAQMEIYFLPNLTRKQYTAFIRKLFDDPSQSSELLSEAKKLNDSQAPK

SEQ ID NO: 148 - protein, 58 aa, synthetic construct
  REGION 1..58: note = Engineered IL-1R-I binding polypeptide
VDAKYAKEIENAQMEIFYLPNLTRKQYTAFIRKLFDDPSQSSELLSEAKKLNDSQAPK

SEQ ID NO: 149 - protein, 58 aa, synthetic construct
  REGION 1..58: note = Engineered IL-1R-I binding polypeptide
VDAKYAKEVDDAYMEIFRLPNLTRRQYTAFIRKLLDDPSQSSELLSEAKKLNDSQAPK

SEQ ID NO: 150 - protein, 58 aa, synthetic construct
  REGION 1..58: note = Engineered IL-1R-I binding polypeptide
VDAKYAKEVEEAQMEIFSLPNLTRKQYTAFIRKLLDDPSQSSELLSEAKKLNDSQAPK

SEQ ID NO: 151 - protein, 58 aa, synthetic construct
  REGION 1..58: note = Engineered IL-1R-I binding polypeptide
VDAKYAKEVESAQMEIFKLPNLTRRQYTAFIRKLLDDPSQSSELLSEAKKLNDSQAPK

SEQ ID NO: 152 - protein, 58 aa, synthetic construct
  REGION 1..58: note = Engineered IL-1R-I binding polypeptide
VDAKYAKETEIAQMEIFALPNLTRKQYTAFIRKLLDDPSQSSELLSEAKKLNDSQAPK

SEQ ID NO: 153 - protein, 58 aa, synthetic construct
  REGION 1..58: note = Engineered IL-1R-I binding polypeptide
VDAKYAKEVERAQMEIFDLPNLTRKQYTAFIRKLLDDPSQSSELLSEAKKLNDSQAPK

SEQ ID NO: 154 - protein, 58 aa, synthetic construct
  REGION 1..58: note = Engineered IL-1R-I binding polypeptide
VDAKYAKETETAQMEIFALPNLTRKQYTAFIRKLLDDPSQSSELLSEAKKLNDSQAPK

SEQ ID NO: 155 - protein, 58 aa, synthetic construct
  REGION 1..58: note = Engineered IL-1R-I binding polypeptide
VDAKYAKEIEYAQMEIFALPNLTRKQYTAFIRKLFDDPSQSSELLSEAKKLNDSQAPK

SEQ ID NO: 156 - protein, 58 aa, synthetic construct
  REGION 1..58: note = Engineered IL-1R-I binding polypeptide
VDAKYAKELERAQMEIYHLPNLTRKQYTAFIRKLFDDPSQSSELLSEAKKLNDSQAPK

SEQ ID NO: 157 - protein, 58 aa, synthetic construct
  REGION 1..58: note = Engineered IL-1R-I binding polypeptide
VDAKYAKESEIAQMEIFALPNLTRRQYTAFIRKLLDDPSQSSELLSEAKKLNDSQAPK

SEQ ID NO: 158 - protein, 58 aa, synthetic construct
  REGION 1..58: note = Engineered IL-1R-I binding polypeptide
VDAKYAKETEKAQMEIFALPNLTRKQYTAFIRKLLDDPSQSSELLSEAKKLNDSQAPK

SEQ ID NO: 159 - protein, 58 aa, synthetic construct
  REGION 1..58: note = Engineered IL-1R-I binding polypeptide
VDAKYAKEVENAQMEIFNLPNLTRKQYTAFIRKLLDDPSQSSELLSEAKKLNDSQAPK

SEQ ID NO: 160 - protein, 58 aa, synthetic construct
  REGION 1..58: note = Engineered IL-1R-I binding polypeptide
VDAKYAKEVEEAQLEIFALPNLTRKQYTAFIRKLLDDPSQSSELLSEAKKLNDSQAPK

SEQ ID NO: 161 - protein, 58 aa, synthetic construct
  REGION 1..58: note = Engineered IL-1R-I binding polypeptide
VDAKYAKEVKEAQLEIFALPNLTRKQYTAFIRKLLDDPSQSSELLSEAKKLNDSQAPK

SEQ ID NO: 162 - protein, 58 aa, synthetic construct
  REGION 1..58: note = Engineered IL-1R-I binding polypeptide
VDAKYAKEVQEAQMEIFALPNLTRKQYTAFIRKLLDDPSQSSELLSEAKKLNDSQAPK

SEQ ID NO: 163 - protein, 58 aa, synthetic construct
  REGION 1..58: note = Engineered IL-1R-I binding polypeptide
VDAKYAKEVQFAYMEIFHLPNLTRRQYTAFIRKLLDDPSQSSELLSEAKKLNDSQAPK

SEQ ID NO: 164 - protein, 58 aa, synthetic construct
  REGION 1..58: note = Engineered IL-1R-I binding polypeptide
VDAKYAKELEHAYMEIYALPNLTRKQYTAFIRKLLDDPSQSSELLSEAKKLNDSQAPK

SEQ ID NO: 165 - protein, 58 aa, synthetic construct
  REGION 1..58: note = Engineered IL-1R-I binding polypeptide
VDAKYAKETEAAQMEIFALPNLTRKQYTAFIRKLLDDPSQSSELLSEAKKLNDSQAPK

SEQ ID NO: 166 - protein, 58 aa, synthetic construct
  REGION 1..58: note = Engineered IL-1R-I binding polypeptide
VDAKYAKEVETAQMEIFALPNLTRKQYTAFIRKLFDDPSQSSELLSEAKKLNDSQAPK

SEQ ID NO: 167 - protein, 58 aa, synthetic construct
  REGION 1..58: note = Engineered IL-1R-I binding polypeptide
VDAKYAKELEKAQMEIYYLPNLTRRQYTAFIRKLLDDPSQSSELLSEAKKLNDSQAPK

SEQ ID NO: 168 - protein, 58 aa, synthetic construct
  REGION 1..58: note = Engineered IL-1R-I binding polypeptide
VDAKYAKEIEEAQMEIYDLPNLTRKQYTAFIRKLFDDPSQSSELLSEAKKLNDSQAPK

SEQ ID NO: 169 - protein, 58 aa, synthetic construct
  REGION 1..58: note = Engineered IL-1R-I binding polypeptide
VDAKYAKELESAYMEIYSLPNLTRKQYTAFIRKLLDDPSQSSELLSEAKKLNDSQAPK

SEQ ID NO: 170 - protein, 58 aa, synthetic construct
  REGION 1..58: note = Engineered IL-1R-I binding polypeptide
VDAKYAKEIEVAQMEIFSLPNLTRKQYTAFIRKLFDDPSQSSELLSEAKKLNDSQAPK

SEQ ID NO: 171 - protein, 58 aa, synthetic construct
  REGION 1..58: note = Engineered IL-1R-I binding polypeptide
VDAKYAKEVELAQMEIFELPNLTRKQYTAFIRKLLDDPSQSSELLSEAKKLNDSQAPK

SEQ ID NO: 172 - protein, 58 aa, synthetic construct
  REGION 1..58: note = Engineered IL-1R-I binding polypeptide
VDAKYAKEIEEAQMEIFTLPNLTRKQYTAFIRKLLDDPSQSSELLSEAKKLNDSQAPK

SEQ ID NO: 173 - protein, 58 aa, synthetic construct
  REGION 1..58: note = Engineered IL-1R-I binding polypeptide
VDAKYAKEIEAAQMEIYYLPNLTRKQYTAFIIKLLDDPSQSSELLSEAKKLNDSQAPK

SEQ ID NO: 174 - protein, 58 aa, synthetic construct
  REGION 1..58: note = Engineered IL-1R-I binding polypeptide
VDAKYAKEIEEAYMEIYNLPNLTRKQYTAFIRKLLDDPSQSSELLSEAKKLNDSQAPK

SEQ ID NO: 175 - protein, 58 aa, synthetic construct
  REGION 1..58: note = Engineered IL-1R-I binding polypeptide
VDAKYAKEVEFAQLEIFSLPNLTRKQYTAFIRKLFDDPSQSSELLSEAKKLNDSQAPK

SEQ ID NO: 176 - protein, 58 aa, synthetic construct
  REGION 1..58: note = Engineered IL-1R-I binding polypeptide
VDAKYAKEIEEAQMEIFALPNLTRKQYTAFIRKLLDDPSQSSELLSEAKKLNDSQAPK

SEQ ID NO: 177 - protein, 58 aa, synthetic construct
  REGION 1..58: note = Engineered IL-1R-I binding polypeptide
VDAKYAKEVEQAQMEIFYLPNLTRKQYTAFIRKLLDDPSQSSELLSEAKKLNDSQAPK

SEQ ID NO: 178 - protein, 58 aa, synthetic construct
  REGION 1..58: note = Engineered IL-1R-I binding polypeptide
VDAKYAKEAFTAQMEIFGLPNLTRKQYTAFIRKLLDDPSQSSELLSEAKKLNDSQAPK

SEQ ID NO: 179 - protein, 58 aa, synthetic construct
  REGION 1..58: note = Engineered IL-1R-I binding polypeptide
VDAKYAKETHQAQMEIFALPNLTRKQYTAFIRKLLDDPSQSSELLSEAKKLNDSQAPK

SEQ ID NO: 180 - protein, 58 aa, synthetic construct
  REGION 1..58: note = Engineered IL-1R-I binding polypeptide
VDAKYAKEVEDAQMEIFALPNLTRKQYTAFIRKLLDDPSQSSELLSEAKKLNDSQAPK

SEQ ID NO: 181 - protein, 58 aa, synthetic construct
  REGION 1..58: note = Engineered IL-1R-I binding polypeptide
VDAKYAKEVEQAQMEIYVLPNLTRKQYTAFIRKLLDDPSQSSELLSEAKKLNDSQAPK

SEQ ID NO: 182 - protein, 58 aa, synthetic construct
  REGION 1..58: note = Engineered IL-1R-I binding polypeptide
VDAKYAKEVEAAQMEIFNLPNLTRKQYTAFIRKLLDDPSQSSELLSEAKKLNDSQAPK

SEQ ID NO: 183 - protein, 58 aa, synthetic construct
  REGION 1..58: note = Engineered IL-1R-I binding polypeptide
VDAKYAKEVEEAQMEIFSLPNLTRRQYTAFIRKLLDDPSQSSELLSEAKKLNDSQAPK

SEQ ID NO: 184 - protein, 58 aa, synthetic construct
  REGION 1..58: note = Engineered IL-1R-I binding polypeptide
VDAKYAKEIEEAQMEIYALPNLTRKQYTAFIRKLFDDPSQSSELLSEAKKLNDSQAPK

SEQ ID NO: 185 - protein, 58 aa, synthetic construct
  REGION 1..58: note = Engineered IL-1R-I binding polypeptide
VDAKYAKEIEQAQMEIFHLPNLTRKQYTAFIRKLLDDPSQSSELLSEAKKLNDSQAPK

SEQ ID NO: 186 - protein, 58 aa, synthetic construct
  REGION 1..58: note = Engineered IL-1R-I binding polypeptide
VDAKYAKETEEAQMEIFALPNLTRRQYTAFIRKLLDDPSQSSELLSEAKKLNDSQAPK

SEQ ID NO: 187 - protein, 58 aa, synthetic construct
  REGION 1..58: note = Engineered IL-1R-I binding polypeptide
VDAKYAKEIERAQMEIFALPNLTRKQYTAFIRKLLDDPSQSSELLSEAKKLNDSQAPK

SEQ ID NO: 188 - protein, 58 aa, synthetic construct
  REGION 1..58: note = Engineered IL-1R-I binding polypeptide
VDAKYAKELESAQMEIYELPNLTRKQYTAFIRKLLDDPSQSSELLSEAKKLNDSQAPK

SEQ ID NO: 189 - protein, 58 aa, synthetic construct
  REGION 1..58: note = Engineered IL-1R-I binding polypeptide
VDAKYAKEVEAAQMEIFYLPNLTRKQYTAFIRKLLDDPSQSSELLSEAKKLNDSQAPK

SEQ ID NO: 190 - protein, 58 aa, synthetic construct
  REGION 1..58: note = Engineered IL-1R-I binding polypeptide
VDAKYAKEVEEAQMEIFGLPNLTRKQYTAFIRKLLDDPSQSSELLSEAKKLNDSQAPK

SEQ ID NO: 191 - protein, 58 aa, synthetic construct
  REGION 1..58: note = Engineered IL-1R-I binding polypeptide
VDAKYAKEVEEAQMEIYYLPNLTRKQYTAFIRKLLDDPSQSSELLSEAKKLNDSQAPK

SEQ ID NO: 192 - protein, 58 aa, synthetic construct
  REGION 1..58: note = Engineered IL-1R-I binding polypeptide
VDAKYAKEVEKAQMEIFGLPNLTRKQYTAFIRKLFDDPSQSSELLSEAKKLNDSQAPK

SEQ ID NO: 193 - protein, 58 aa, synthetic construct
  REGION 1..58: note = Engineered IL-1R-I binding polypeptide
VDAKYAKEVEQAYMEIYNLPNLTRKQYTAFIRKLLDDPSQSSELLSEAKKLNDSQAPK

SEQ ID NO: 194 - protein, 58 aa, synthetic construct
  REGION 1..58: note = Engineered IL-1R-I binding polypeptide
VDAKYAKELEHAYHEIYILPNLTRKQYTAFIRKLLDDPSQSSELLSEAKKLNDSQAPK

SEQ ID NO: 195 - protein, 58 aa, synthetic construct
  REGION 1..58: note = Engineered IL-1R-I binding polypeptide
VDAKYAKEIEEAQMEIFNLPNLTRKQYTAFIRKLLDDPSQSSELLSEAKKLNDSQAPK

SEQ ID NO: 196 - protein, 58 aa, synthetic construct
  REGION 1..58: note = Engineered IL-1R-I binding polypeptide
VDAKYAKEVEDAQQEIFHLPNLTRKQYTAFIRKLLDDPSQSSELLSEAKKLNDSQAPK

SEQ ID NO: 197 - protein, 58 aa, synthetic construct
  REGION 1..58: note = Engineered IL-1R-I binding polypeptide
VDAKYAKEIEIAQMEIYALPNLTRKQYTAFIRKLFDDPSQSSELLSEAKKLNDSQAPK

SEQ ID NO: 198 - protein, 58 aa, synthetic construct
  REGION 1..58: note = Engineered IL-1R-I binding polypeptide
VDAKYAKEVEWAQMEIFSLPNLTRKQYTAFIRKLLDDPSQSSELLSEAKKLNDSQAPK

SEQ ID NO: 199 - protein, 58 aa, synthetic construct
  REGION 1..58: note = Engineered IL-1R-I binding polypeptide
VDAKYAKEVLDAQMEIFGLPNLTRKQYTAFIRKLLDDPSQSSELLSEAKKLNDSQAPK

SEQ ID NO: 200 - protein, 58 aa, synthetic construct
  REGION 1..58: note = Engineered IL-1R-I binding polypeptide
VDAKYAKEVESAQMEIFNLPNLTRKQYTAFIRKLFDDPSQSSELLSEAKKLNDSQAPK

SEQ ID NO: 201 - protein, 58 aa, synthetic construct
  REGION 1..58: note = Engineered IL-1R-I binding polypeptide
VDAKYAKEIEEAQMEIFQLPNLTRKQYTAFIRKLLDDPSQSSELLSEAKKLNDSQAPK

SEQ ID NO: 202 - protein, 58 aa, synthetic construct
  REGION 1..58: note = Engineered IL-1R-I binding polypeptide
VDAKYAKEIEDAQMEIFYLPNLTRKQYTAFIRKLLDDPSQSSELLSEAKKLNDSQAPK

SEQ ID NO: 203 - protein, 58 aa, synthetic construct
  REGION 1..58: note = Engineered IL-1R-I binding polypeptide
VDAKYAKEVEIAYMEIFHLPNLTRKQYTAFIRKLLDDPSQSSELLSEAKKLNDSQAPK

SEQ ID NO: 204 - protein, 58 aa, synthetic construct
  REGION 1..58: note = Engineered IL-1R-I binding polypeptide
VDAKYAKEAYRAQMEIFALPNLTRKQYTAFIRKLLDDPSQSSELLSEAKKLNDSQAPK

SEQ ID NO: 205 - protein, 58 aa, synthetic construct
  REGION 1..58: note = Engineered IL-1R-I binding polypeptide
VDAKYAKEVELAQMEIFSLPNLTRKQYTAFIRKLLDDPSQSSELLSEAKKLNDSQAPK

SEQ ID NO: 206 - protein, 58 aa, synthetic construct
  REGION 1..58: note = Engineered IL-1R-I binding polypeptide
VDAKYAKETEHAQMEIYNLPNLTRKQYTAFIRKLFDDPSQSSELLSEAKKLNDSQAPK

SEQ ID NO: 207 - protein, 58 aa, synthetic construct
  REGION 1..58: note = Engineered IL-1R-I binding polypeptide
VDAKYAKEVYIAQMEIYGLPNLTRKQYTAFIRKLFDDPSQSSELLSEAKKLNDSQAPK

SEQ ID NO: 208 - protein, 58 aa, synthetic construct
  REGION 1..58: note = Engineered IL-1R-I binding polypeptide
VDAKYAKEVEVAQMEIFSLPNLTRKQYTAFIRKLLDDPSQSSELLSEAKKLNDSQAPK

SEQ ID NO: 209 - protein, 58 aa, synthetic construct
  REGION 1..58: note = Engineered IL-1R-I binding polypeptide
VDAKYAKELEDAQMEIFKLPNLTRKQYTAFIRKLFDDPSQSSELLSEAKKLNDSQAPK

SEQ ID NO: 210 - protein, 58 aa, synthetic construct
  REGION 1..58: note = Engineered IL-1R-I binding polypeptide
VDAKYAKEIEQAQMEIFALPNLTRKQYTAFIIKLFDDPSQSSELLSEAKKLNDSQAPK

SEQ ID NO: 211 - protein, 58 aa, synthetic construct
  REGION 1..58: note = Engineered IL-1R-I binding polypeptide
VDAKYAKEVEIAQMEIFSLPNLTRKQYTAFIRKLFDDPSQSSELLSEAKKLNDSQAPK

SEQ ID NO: 212 - protein, 58 aa, synthetic construct
  REGION 1..58: note = Engineered IL-1R-I binding polypeptide
VDAKYAKEVEVAQMEIFNLPNLTRRQYTAFIRKLLDDPSQSSELLSEAKKLNDSQAPK

SEQ ID NO: 213 - protein, 58 aa, synthetic construct
  REGION 1..58: note = Engineered IL-1R-I binding polypeptide
VDAKYAKEVEEAQLEIFGLPNLTRKQYTAFIRKLLDDPSQSSELLSEAKKLNDSQAPK

SEQ ID NO: 214 - protein, 58 aa, synthetic construct
  REGION 1..58: note = Engineered IL-1R-I binding polypeptide
VDAKYAKETEQAQMEIFNLPNLTRRQYTAFIRKLLDDPSQSSELLSEAKKLNDSQAPK

SEQ ID NO: 215 - protein, 58 aa, synthetic construct
  REGION 1..58: note = Engineered IL-1R-I binding polypeptide
VDAKYAKEIEVAQMEIFALPNLTRKQYTAFIRKLFDDPSQSSELLSEAKKLNDSQAPK

SEQ ID NO: 216 - protein, 58 aa, synthetic construct
  REGION 1..58: note = Engineered IL-1R-I binding polypeptide
VDAKYAKEVEQAQMEIFFLPNLTRKQYTAFIRKLLDDPSQSSELLSEAKKLNDSQAPK

SEQ ID NO: 217 - protein, 58 aa, synthetic construct
  REGION 1..58: note = Engineered IL-1R-I binding polypeptide
VDAKYAKEIESAQMEIFDLPNLTRKQYTAFIRKLLDDPSQSSELLSEAKKLNDSQAPK

SEQ ID NO: 218 - protein, 58 aa, synthetic construct
  REGION 1..58: note = Engineered IL-1R-I binding polypeptide
VDAKYAKEIEKAQMEIFYLPNLTRKQYTAFIRKLLDDPSQSSELLSEAKKLNDSQAPK

SEQ ID NO: 219 - protein, 58 aa, synthetic construct
  REGION 1..58: note = Engineered IL-1R-I binding polypeptide
VDAKYAKEVEEAYMEIYYLPNLTRKQYTAFIRKLLDDPSQSSELLSEAKKLNDSQAPK

SEQ ID NO: 220 - protein, 58 aa, synthetic construct
  REGION 1..58: note = Engineered IL-1R-I binding polypeptide
VDAKYAKEVEDAQMEIYYLPNLTRKQYTAFIRKLLDDPSQSSELLSEAKKLNDSQAPK

SEQ ID NO: 221 - protein, 58 aa, synthetic construct
  REGION 1..58: note = Engineered IL-1R-I binding polypeptide
VDAKYAKEVEEAQMEIYDLPNLTRKQYTAFIRKLLDDPSQSSELLSEAKKLNDSQAPK

SEQ ID NO: 222 - protein, 58 aa, synthetic construct
  REGION 1..58: note = Engineered IL-1R-I binding polypeptide
VDAKYAKEVELAQMEIFNLPNLTRKQYTAFIRKLLDDPSQSSELLSEAKKLNDSQAPK

SEQ ID NO: 223 - protein, 58 aa, synthetic construct
  REGION 1..58: note = Engineered IL-1R-I binding polypeptide
VDAKYAKETEYAQMEIFALPNLTRKQYTAFIRKLFDDPSQSSELLSEAKKLNDSQAPK

SEQ ID NO: 224 - protein, 58 aa, synthetic construct
  REGION 1..58: note = Engineered IL-1R-I binding polypeptide
VDAKYAKEVEAAQMEIYGLPNLTRKQYTAFIRKLFDDPSQSSELLSEAKKLNDSQAPK

SEQ ID NO: 225 - protein, 58 aa, synthetic construct
  REGION 1..58: note = Engineered IL-1R-I binding polypeptide
VDAKYAKEVEVAQMEIFALPNLTRRQYTAFIRKLLDDPSQSSELLSEAKKLNDSQAPK

SEQ ID NO: 226 - protein, 58 aa, synthetic construct
  REGION 1..58: note = Engineered IL-1R-I binding polypeptide
VDAKYAKEIEFAQMEIFALPNLTRKQYTAFIRKLFDDPSQSSELLSEAKKLNDSQAPK

SEQ ID NO: 227 - protein, 58 aa, synthetic construct
  REGION 1..58: note = Engineered IL-1R-I binding polypeptide
VDAKYAKEVEEAQMEIFALPNLTRKQYTAFIRKLLDDPSQSSELLSEAKKLNDSQAPK

SEQ ID NO: 228 - protein, 58 aa, synthetic construct
  REGION 1..58: note = Engineered IL-1R-I binding polypeptide
VDAKYAKEVEEAQMEIFTLPNLTRKQYTAFIRKLLDDPSQSSELLSEAKKLNDSQAPK

SEQ ID NO: 229 - protein, 58 aa, synthetic construct
  REGION 1..58: note = Engineered IL-1R-I binding polypeptide
VDAKYAKEVEVAYMEIYNLPNLTRKQYTAFIRKLLDDPSQSSELLSEAKKLNDSQAPK

SEQ ID NO: 230 - protein, 58 aa, synthetic construct
  REGION 1..58: note = Engineered IL-1R-I binding polypeptide
VDAKYAKEVEKAQMEIYYLPNLTRKQYTAFIRKLFDDPSQSSELLSEAKKLNDSQAPK

SEQ ID NO: 231 - protein, 58 aa, synthetic construct
  REGION 1..58: note = Engineered IL-1R-I binding polypeptide
VDAKYAKEVYQAQMEIFYLPNLTRKQYTAFIRKLLDDPSQSSELLSEAKKLNDSQAPK

SEQ ID NO: 232 - protein, 58 aa, synthetic construct
  REGION 1..58: note = Engineered IL-1R-I binding polypeptide
VDAKYAKEIRDAQMEIFDLPNLTRKQYTAFIRKLFDDPSQSSELLSEAKKLNDSQAPK

SEQ ID NO: 233 - protein, 58 aa, synthetic construct
  REGION 1..58: note = Engineered IL-1R-I binding polypeptide
VDAKYAKEIEDAQLEIFALPNLTRKQYTAFIRKLLDDPSQSSELLSEAKKLNDSQAPK

SEQ ID NO: 234 - protein, 58 aa, synthetic construct
  REGION 1..58: note = Engineered IL-1R-I binding polypeptide
VDAKYAKEVEYAQMEIFALPNLTRKQYTAFIRKLLDDPSQSSELLSEAKKLNDSQAPK

SEQ ID NO: 235 - protein, 58 aa, synthetic construct
  REGION 1..58: note = Engineered IL-1R-I binding polypeptide
VDAKYAKEAYYAQMEIFALPNLTRKQYTAFIRKLLDDPSQSSELLSEAKKLNDSQAPK

SEQ ID NO: 236 - protein, 58 aa, synthetic construct
  REGION 1..58: note = Engineered IL-1R-I binding polypeptide
VDAKYAKEAEDAYMEIYELPNLTRKQYTAFIRKLLDDPSQSSELLSEAKKLNDSQAPK

SEQ ID NO: 237 - protein, 58 aa, synthetic construct
  REGION 1..58: note = Engineered IL-1R-I binding polypeptide
VDAKYAKEIEDAYMEIYRLPNLTRRQYTAFIRKLLDDPSQSSELLSEAKKLNDSQAPK

SEQ ID NO: 238 - protein, 58 aa, synthetic construct
  REGION 1..58: note = Engineered IL-1R-I binding polypeptide
VDAKYAKEVEEAQMEIFELPNLTRKQYTAFIRKLFDDPSQSSELLSEAKKLNDSQAPK

SEQ ID NO: 239 - protein, 58 aa, synthetic construct
  REGION 1..58: note = Engineered IL-1R-I binding polypeptide
VDAKYAKELEEAQMEIFALPNLTRKQYTAFIRKLLDDPSQSSELLSEAKKLNDSQAPK

SEQ ID NO: 240 - protein, 58 aa, synthetic construct
  REGION 1..58: note = Engineered IL-1R-I binding polypeptide
VDAKYAKEVETAQMEIFELPNLTRKQYTAFIRKLFDDPSQSSELLSEAKKLNDSQAPK

SEQ ID NO: 241 - protein, 58 aa, synthetic construct
  REGION 1..58: note = Engineered IL-1R-I binding polypeptide
VDAKYAKEIEDAQMEIFQLPNLTRKQYTAFIRKLLDDPSQSSELLSEAKKLNDSQAPK

SEQ ID NO: 242 - protein, 58 aa, synthetic construct
  REGION 1..58: note = Engineered IL-1R-I binding polypeptide
VDAKYAKEVEDAQMEIFELPNLTRKQYTAFIRKLFDDPSQSSELLSEAKKLNDSQAPK

SEQ ID NO: 243 - protein, 58 aa, synthetic construct
  REGION 1..58: note = Engineered IL-1R-I binding polypeptide
VDAKYAKEVEEAYMEIYHLPNLTRKQYTAFIRKLLDDPSQSSELLSEAKKLNDSQAPK

SEQ ID NO: 244 - protein, 58 aa, synthetic construct
  REGION 1..58: note = Engineered IL-1R-I binding polypeptide
VDAKYAKEVQDAQMEIFELPNLTRKQYTAFIRKLLDDPSQSSELLSEAKKLNDSQAPK

SEQ ID NO: 245 - protein, 58 aa, synthetic construct
  REGION 1..58: note = Engineered IL-1R-I binding polypeptide
VDAKYAKEIETAQMEIFALPNLTRKQYTAFIRKLFDDPSQSSELLSEAKKLNDSQAPK

SEQ ID NO: 246 - protein, 58 aa, synthetic construct
  REGION 1..58: note = Engineered IL-1R-I binding polypeptide
VDAKYAKEVEDAQMEIFGLPNLTRKQYTAFIRKLLDDPSQSSELLSEAKKLNDSQAPK

SEQ ID NO: 247 - protein, 58 aa, synthetic construct
  REGION 1..58: note = Engineered IL-1R-I binding polypeptide
VDAKYAKETEEAQMEIFRLPNLTRRQYTAFIRKLLDDPSQSSELLSEAKKLNDSQAPK

SEQ ID NO: 248 - protein, 58 aa, synthetic construct
  REGION 1..58: note = Engineered IL-1R-I binding polypeptide
VDAKYAKEVERAQMEIFNLPNLTRKQYTAFIRKLFDDPSQSSELLSEAKKLNDSQAPK

SEQ ID NO: 249 - protein, 58 aa, synthetic construct
  REGION 1..58: note = Engineered IL-1R-I binding polypeptide
VDAKYAKEAEYAQMEIFALPNLTRRQYTAFIRKLLDDPSQSSELLSEAKKLNDSQAPK

SEQ ID NO: 250 - protein, 58 aa, synthetic construct
  REGION 1..58: note = Engineered IL-1R-I binding polypeptide
VDAKYAKEIYSAQMEIFKLPNLTRKQYTAFIRKLFDDPSQSSELLSEAKKLNDSQAPK

SEQ ID NO: 251 - protein, 58 aa, synthetic construct
  REGION 1..58: note = Engineered IL-1R-I binding polypeptide
VDAKYAKEIEKAQMEIFSLPNLTRKQYTAFIRKLLDDPSQSSELLSEAKKLNDSQAPK

SEQ ID NO: 252 - protein, 58 aa, synthetic construct
  REGION 1..58: note = Engineered IL-1R-I binding polypeptide
VDAKYAKEIEEAQMEIYYLPNLTRKQYTAFIRKLFDDPSQSSELLSEAKKLNDSQAPK

SEQ ID NO: 253 - protein, 58 aa, synthetic construct
  REGION 1..58: note = Engineered IL-1R-I binding polypeptide
VDAKYAKEVEQAQMEIFSLPNLTRKQYTAFIRKLLDDPSQSSELLSEAKKLNDSQAPK

SEQ ID NO: 254 - protein, 58 aa, synthetic construct
  REGION 1..58: note = Engineered IL-1R-I binding polypeptide
VDAKYAKEVEAAQMEIFNLPNLTRRQYTAFIRKLLDDPSQSSELLSEAKKLNDSQAPK

SEQ ID NO: 255 - protein, 58 aa, synthetic construct
  REGION 1..58: note = Engineered IL-1R-I binding polypeptide
VDAKYAKEVESAQMEIFALPNLTRKQYTAFIRKLLDDPSQSSELLSEAKKLNDSQAPK

SEQ ID NO: 256 - protein, 58 aa, synthetic construct
  REGION 1..58: note = Engineered IL-1R-I binding polypeptide
VDAKYAKEIEAAQMEIFDLPNLTRKQYTAFIRKLFDDPSQSSELLSEAKKLNDSQAPK

SEQ ID NO: 257 - protein, 58 aa, synthetic construct
  REGION 1..58: note = Engineered IL-1R-I binding polypeptide
VDAKYAKETERAQMEIFALPNLTRKQYTAFIRKLLDDPSQSSELLSEAKKLNDSQAPK

SEQ ID NO: 258 - protein, 58 aa, synthetic construct
  REGION 1..58: note = Engineered IL-1R-I binding polypeptide
VDAKYAKEAEVAYFEIYALPNLTRKQYTAFIRKLLDDPSQSSELLSEAKKLNDSQAPK

SEQ ID NO: 259 - protein, 58 aa, synthetic construct
  REGION 1..58: note = Engineered IL-1R-I binding polypeptide
VDAKYAKEIEEAQMEIFGLPNLTRKQYTAFIRKLLDDPSQSSELLSEAKKLNDSQAPK

SEQ ID NO: 260 - protein, 58 aa, synthetic construct
  REGION 1..58: note = Engineered IL-1R-I binding polypeptide
VDAKYAKEVEQAQMEIFGLPNLTRKQYTAFIRKLLDDPSQSSELLSEAKKLNDSQAPK

SEQ ID NO: 261 - protein, 58 aa, synthetic construct
  REGION 1..58: note = Engineered IL-1R-I binding polypeptide
VDAKYAKEAEEAQMEIFTLPNLTRKQYTAFIRKLLDDPSQSSELLSEAKKLNDSQAPK

SEQ ID NO: 262 - protein, 58 aa, synthetic construct
  REGION 1..58: note = Engineered IL-1R-I binding polypeptide
VDAKYAKEVEEAQMEIFKLPNLTRKQYTAFIRKLLDDPSQSSELLSEAKKLNDSQAPK

SEQ ID NO: 263 - protein, 58 aa, synthetic construct
  REGION 1..58: note = Engineered IL-1R-I binding polypeptide
VDAKYAKETYYAQMEIFSLPNLTRKQYTAFIRKLLDDPSQSSELLSEAKKLNDSQAPK

SEQ ID NO: 264 - protein, 58 aa, synthetic construct
  REGION 1..58: note = Engineered IL-1R-I binding polypeptide
VDAKYAKEVEEAQMEIYSLPNLTRKQYTAFIRKLFDDPSQSSELLSEAKKLNDSQAPK

SEQ ID NO: 265 - protein, 58 aa, synthetic construct
  REGION 1..58: note = Engineered IL-1R-I binding polypeptide
VDAKYAKEIEAAQMEIFYLPNLTRKQYTAFIRKLLDDPSQSSELLSEAKKLNDSQAPK

SEQ ID NO: 266 - protein, 58 aa, synthetic construct
  REGION 1..58: note = Engineered IL-1R-I binding polypeptide
VDAKYAKEIEEAQMEIFYLPNLTRKQYTAFIRKLFDDPSQSSELLSEAKKLNDSQAPK

SEQ ID NO: 267 - protein, 58 aa, synthetic construct
  REGION 1..58: note = Engineered IL-1R-I binding polypeptide
VDAKYAKEIESAQMEIFYLPNLTRKQYTAFIRKLLDDPSQSSELLSEAKKLNDSQAPK

SEQ ID NO: 268 - protein, 58 aa, synthetic construct
  REGION 1..58: note = Engineered IL-1R-I binding polypeptide
VDAKYAKEVEEAQMEIFALPNLTRRQYTAFIRKLLDDPSQSSELLSEAKKLNDSQAPK

SEQ ID NO: 269 - protein, 58 aa, synthetic construct
  REGION 1..58: note = Engineered IL-1R-I binding polypeptide
VDAKYAKEAEEAYYEIFGLPNLTRRQYTAFIRKLLDDPSQSSELLSEAKKLNDSQAPK

SEQ ID NO: 270 - protein, 58 aa, synthetic construct
  REGION 1..58: note = Engineered IL-1R-I binding polypeptide
VDAKYAKEVEIAYFEIFGLPNLTRKQYTAFIRKLLDDPSQSSELLSEAKKLNDSQAPK

SEQ ID NO: 271 - protein, 58 aa, synthetic construct
  REGION 1..58: note = Engineered IL-1R-I binding polypeptide
VDAKYAKEVEVAQLEIFRLPNLTRKQYTAFIRKLLDDPSQSSELLSEAKKLNDSQAPK

SEQ ID NO: 272 - protein, 58 aa, synthetic construct
  REGION 1..58: note = Engineered IL-1R-I binding polypeptide
VDAKYAKEVEEAQMEIYFLPNLTRKQYTAFIRKLLDDPSQSSELLSEAKKLNDSQAPK

SEQ ID NO: 273 - protein, 58 aa, synthetic construct
  REGION 1..58: note = Engineered IL-1R-I binding polypeptide
VDAKYAKEIEEAQMEIYRLPNLTRKQYTAFIRKLFDDPSQSSELLSEAKKLNDSQAPK

SEQ ID NO: 274 - protein, 58 aa, synthetic construct
  REGION 1..58: note = Engineered IL-1R-I binding polypeptide
VDAKYAKEVRAAQMEIFELPNLTRKQYTAFIRKLLDDPSQSSELLSEAKKLNDSQAPK

SEQ ID NO: 275 - protein, 58 aa, synthetic construct
  REGION 1..58: note = Engineered IL-1R-I binding polypeptide
VDAKYAKEVEIAQMEIFELPNLTRKQYTAFIRKLLDDPSQSSELLSEAKKLNDSQAPK

SEQ ID NO: 276 - protein, 58 aa, synthetic construct
  REGION 1..58: note = Engineered IL-1R-I binding polypeptide
VDAKYAKEAERAQMEIWKLPNLTRKQYTAFIRKLFDDPSQSSELLSEAKKLNDSQAPK

SEQ ID NO: 277 - protein, 58 aa, synthetic construct
  REGION 1..58: note = Engineered IL-1R-I binding polypeptide
VDAKYAKETESAYWEIYALPNLTRKQYTAFIRKLLDDPSQSSELLSEAKKLNDSQAPK

SEQ ID NO: 278 - protein, 58 aa, synthetic construct
  REGION 1..58: note = Engineered IL-1R-I binding polypeptide
VDAKYAKEVEEAQMEIFALPNLTRKQYTAFIIKLFDDPSQSSELLSEAKKLNDSQAPK

SEQ ID NO: 279 - protein, 58 aa, synthetic construct
  REGION 1..58: note = Engineered IL-1R-I binding polypeptide
VDAKYAKELEAAQMEIYELPNLTRKQYTAFIRKLLDDPSQSSELLSEAKKLNDSQAPK

SEQ ID NO: 280 - protein, 58 aa, synthetic construct
  REGION 1..58: note = Engineered IL-1R-I binding polypeptide
VDAKYAKEVEVAQMEIFKLPNLTRKQYTAFIRKLLDDPSQSSELLSEAKKLNDSQAPK

SEQ ID NO: 281 - protein, 58 aa, synthetic construct
  REGION 1..58: note = Engineered IL-1R-I binding polypeptide
VDAKYAKEVEVAQMEIFELPNLTRKQYTAFIRKLFDDPSQSSELLSEAKKLNDSQAPK

SEQ ID NO: 282 - protein, 58 aa, synthetic construct
  REGION 1..58: note = Engineered IL-1R-I binding polypeptide
VDAKYAKEVEEAQMEIFFLPNLTRKQYTAFIIKLLDDPSQSSELLSEAKKLNDSQAPK

SEQ ID NO: 283 - protein, 58 aa, synthetic construct
  REGION 1..58: note = Engineered IL-1R-I binding polypeptide
VDAKYAKEVEAAYMEIYALPNLTRKQYTAFIRKLLDDPSQSSELLSEAKKLNDSQAPK

SEQ ID NO: 284 - protein, 58 aa, synthetic construct
  REGION 1..58: note = Engineered IL-1R-I binding polypeptide
VDAKYAKEAEYAYYEIYALPNLTRKQYTAFIRKLLDDPSQSSELLSEAKKLNDSQAPK

SEQ ID NO: 285 - protein, 58 aa, synthetic construct
  REGION 1..58: note = Engineered IL-1R-I binding polypeptide
VDAKYAKEVESAQMEIFALPNLTRKQYTAFIRKLFDDPSQSSELLSEAKKLNDSQAPK

SEQ ID NO: 286 - protein, 58 aa, synthetic construct
  REGION 1..58: note = Engineered IL-1R-I binding polypeptide
VDAKYAKELEQAQMEIFALPNLTRKQYTAFIRKLFDDPSQSSELLSEAKKLNDSQAPK

SEQ ID NO: 287 - protein, 58 aa, synthetic construct
  REGION 1..58: note = Engineered IL-1R-I binding polypeptide
VDAKYAKEIEIAQMEIFELPNLTRKQYTAFIRKLFDDPSQSSELLSEAKKLNDSQAPK

SEQ ID NO: 288 - protein, 58 aa, synthetic construct
  REGION 1..58: note = Engineered IL-1R-I binding polypeptide
VDAKYAKEVESAQMEIFALPNLTRKQYTAFIIKLFDDPSQSSELLSEAKKLNDSQAPK

SEQ ID NO: 289 - protein, 58 aa, synthetic construct
  REGION 1..58: note = Engineered IL-1R-I binding polypeptide
VDAKYAKEAENAQMEIFNLPNLTRKQYTAFIRKLLDDPSQSSELLSEAKKLNDSQAPK

SEQ ID NO: 290 - protein, 58 aa, synthetic construct
  REGION 1..58: note = Engineered IL-1R-I binding polypeptide
VDAKYAKEVTTAYYEIYNLPNLTRRQYTAFIRKLLDDPSQSSELLSEAKKLNDSQAPK

SEQ ID NO: 291 - protein, 58 aa, synthetic construct
  REGION 1..58: note = Engineered IL-1R-I binding polypeptide
VDAKYAKEIESAYYEIFALPNLTRKQYTAFIRKLLDDPSQSSELLSEAKKLNDSQAPK

SEQ ID NO: 292 - protein, 58 aa, synthetic construct
  REGION 1..58: note = Engineered IL-1R-I binding polypeptide
VDAKYAKEVEEAQMEIFYLPNLTRRQYTAFIIKLLDDPSQSSELLSEAKKLNDSQAPK

SEQ ID NO: 293 - protein, 58 aa, synthetic construct
  REGION 1..58: note = Engineered IL-1R-I binding polypeptide
VDAKYAKEIEQAQMEIYRLPNLTRKQYTAFIRKLLDDPSQSSELLSEAKKLNDSQAPK

SEQ ID NO: 294 - protein, 58 aa, synthetic construct
  REGION 1..58: note = Engineered IL-1R-I binding polypeptide
VDAKYAKETEEAQMEIFALPNLTRKQYTAFIRKLFDDPSQSSELLSEAKKLNDSQAPK

SEQ ID NO: 295 - protein, 58 aa, synthetic construct
  REGION 1..58: note = Engineered IL-1R-I binding polypeptide
VDAKYAKEVEEAQMEIFYLPNLTRRQYTAFIRKLFDDPSQSSELLSEAKKLNDSQAPK

SEQ ID NO: 296 - protein, 58 aa, synthetic construct
  REGION 1..58: note = Engineered IL-1R-I binding polypeptide
VDAKYAKEAAAAHWEIYNLPNLTRKQYTAFIRKLFDDPSQSSELLSEAKKLNDSQAPK

SEQ ID NO: 297 - protein, 58 aa, synthetic construct
  REGION 1..58: note = Engineered IL-1R-I binding polypeptide
VDAKYAKEVERAQMEIFGLPNLTRRQYTAFIIKLLDDPSQSSELLSEAKKLNDSQAPK

SEQ ID NO: 298 - protein, 58 aa, synthetic construct
  REGION 1..58: note = Engineered IL-1R-I binding polypeptide
VDAKYAKETERAQMEIFSLPNLTRKQYTAFIRKLLDDPSQSSELLSEAKKLNDSQAPK

SEQ ID NO: 299 - protein, 58 aa, synthetic construct
  REGION 1..58: note = Engineered IL-1R-I binding polypeptide
VDAKYAKEVEEAQMEIYVLPNLTRKQYTAFIRKLLDDPSQSSELLSEAKKLNDSQAPK

SEQ ID NO: 300 - protein, 58 aa, synthetic construct
  REGION 1..58: note = Engineered IL-1R-I binding polypeptide
VDAKYAKEAENAYHEIFNLPNLTRKQYTAFIRKLLDDPSQSSELLSEAKKLNDSQAPK

SEQ ID NO: 301 - protein, 58 aa, synthetic construct
  REGION 1..58: note = Engineered IL-1R-I binding polypeptide
VDAKYAKEAYAAQMEIYALPNLTRKQYTAFIRKLLDDPSQSSELLSEAKKLNDSQAPK

SEQ ID NO: 302 - protein, 58 aa, synthetic construct
  REGION 1..58: note = Engineered IL-1R-I binding polypeptide
VDAKYAKEVETAQMEIYQLPNLTRKQYTAFIRKLFDDPSQSSELLSEAKKLNDSQAPK

SEQ ID NO: 303 - protein, 58 aa, synthetic construct
  REGION 1..58: note = Engineered IL-1R-I binding polypeptide
VDAKYAKEAEDAQLEIFKLPNLTRKQYTAFIRKLLDDPSQSSELLSEAKKLNDSQAPK

SEQ ID NO: 304 - protein, 58 aa, synthetic construct
  REGION 1..58: note = Engineered IL-1R-I binding polypeptide
VDAKYAKEAQEAYYEIFALPNLTRKQYTAFIRKLLDDPSQSSELLSEAKKLNDSQAPK

SEQ ID NO: 305 - protein, 58 aa, synthetic construct
  REGION 1..58: note = Engineered IL-1R-I binding polypeptide
VDAKYAKEVEHAYMEIYSLPNLTRKQYTAFIRKLLDDPSQSSELLSEAKKLNDSQAPK

SEQ ID NO: 306 - protein, 58 aa, synthetic construct
  REGION 1..58: note = Engineered IL-1R-I binding polypeptide
VDAKYAKEVEDAQMEIFKLPNLTRKQYTAFIRKLFDDPSQSSELLSEAKKLNDSQAPK

SEQ ID NO: 307 - protein, 58 aa, synthetic construct
  REGION 1..58: note = Engineered IL-1R-I binding polypeptide
VDAKYAKEVEEAYMEIYRLPNLTRKQYTAFIRKLLDDPSQSSELLSEAKKLNDSQAPK

SEQ ID NO: 308 - protein, 58 aa, synthetic construct
  REGION 1..58: note = Engineered IL-1R-I binding polypeptide
VDAKYAKEIEYAQMEIFDLPNLTRKQYTAFIRKLFDDPSQSSELLSEAKKLNDSQAPK

SEQ ID NO: 309 - protein, 58 aa, synthetic construct
  REGION 1..58: note = Engineered IL-1R-I binding polypeptide
VDAKYAKEAEWAYMEIFALPNLTRKQYTAFIRKLLDDPSQSSELLSEAKKLNDSQAPK

SEQ ID NO: 310 - protein, 58 aa, synthetic construct
  REGION 1..58: note = Engineered IL-1R-I binding polypeptide
VDAKYAKEVEEAQYEIFNLPNLTRKQYTAFIRKLLDDPSQSSELLSEAKKLNDSQAPK

SEQ ID NO: 311 - protein, 58 aa, synthetic construct
  REGION 1..58: note = Engineered IL-1R-I binding polypeptide
VDAKYAKEIEAAQMEIFSLPNLTRKQYTAFIRKLFDDPSQSSELLSEAKKLNDSQAPK

SEQ ID NO: 312 - protein, 58 aa, synthetic construct
  REGION 1..58: note = Engineered IL-1R-I binding polypeptide
VDAKYAKEVENAYMEIFRLPNLTRKQYTAFIRKLLDDPSQSSELLSEAKKLNDSQAPK

SEQ ID NO: 313 - protein, 58 aa, synthetic construct
  REGION 1..58: note = Engineered IL-1R-I binding polypeptide
VDAKYAKEVEHAYQEIFNLPNLTRKQYTAFIRKLLDDPSQSSELLSEAKKLNDSQAPK

SEQ ID NO: 314 - protein, 58 aa, synthetic construct
  REGION 1..58: note = Engineered IL-1R-I binding polypeptide
VDAKYAKEVEDAYMEIYYLPNLTRKQYTAFIRKLLDDPSQSSELLSEAKKLNDSQAPK

SEQ ID NO: 315 - protein, 58 aa, synthetic construct
  REGION 1..58: note = Engineered IL-1R-I binding polypeptide
VDAKYAKEVEDAQMEIFGLPNLTRKQYTAFIIKLLDDPSQSSELLSEAKKLNDSQAPK

SEQ ID NO: 316 - protein, 58 aa, synthetic construct
  REGION 1..58: note = Engineered IL-1R-I binding polypeptide
VDAKYAKEVEAAQMEIFGLPNLTRKQYTAFIRKLLDDPSQSSELLSEAKKLNDSQAPK

SEQ ID NO: 317 - protein, 58 aa, synthetic construct
  REGION 1..58: note = Engineered IL-1R-I binding polypeptide
VDAKYAKEIEKAQFEIFALPNLTRKQYTAFIRKLFDDPSQSSELLSEAKKLNDSQAPK

SEQ ID NO: 318 - protein, 58 aa, synthetic construct
  REGION 1..58: note = Engineered IL-1R-I binding polypeptide
VDAKYAKEVEDAQMEIYSLPNLTRKQYTAFIRKLFDDPSQSSELLSEAKKLNDSQAPK

SEQ ID NO: 319 - protein, 58 aa, synthetic construct
  REGION 1..58: note = Engineered IL-1R-I binding polypeptide
VDAKYAKEAESAYLEIYHLPNLTRKQYTAFIRKLLDDPSQSSELLSEAKKLNDSQAPK

SEQ ID NO: 320 - protein, 58 aa, synthetic construct
  REGION 1..58: note = Engineered IL-1R-I binding polypeptide
VDAKYAKEVVEAYFEIYRLPNLTRKQYTAFIRKLLDDPSQSSELLSEAKKLNDSQAPK

SEQ ID NO: 321 - protein, 58 aa, synthetic construct
  REGION 1..58: note = Engineered IL-1R-I binding polypeptide
VDAKYAKEVEDAYFEIYNLPNLTRKQYTAFIRKLLDDPSQSSELLSEAKKLNDSQAPK

SEQ ID NO: 322 - protein, 58 aa, synthetic construct
  REGION 1..58: note = Engineered IL-1R-I binding polypeptide
VDAKYAKEAEDAYMEIYSLPNLTRRQYTAFIRKLLDDPSQSSELLSEAKKLNDSQAPK

SEQ ID NO: 323 - protein, 58 aa, synthetic construct
  REGION 1..58: note = Engineered IL-1R-I binding polypeptide
VDAKYAKEAQDAYMEIYGLPNLTRKQYTAFIRKLLDDPSQSSELLSEAKKLNDSQAPK

SEQ ID NO: 324 - protein, 58 aa, synthetic construct
  REGION 1..58: note = Engineered IL-1R-I binding polypeptide
VDAKYAKEIEAAQMEIYSLPNLTRKQYTAFIRKLLDDPSQSSELLSEAKKLNDSQAPK

SEQ ID NO: 325 - protein, 58 aa, synthetic construct
  REGION 1..58: note = Engineered IL-1R-I binding polypeptide
VDAKYAKEIEIAQMEIFGLPNLTRKQYTAFIRKLLDDPSQSSELLSEAKKLNDSQAPK

SEQ ID NO: 326 - protein, 58 aa, synthetic construct
  REGION 1..58: note = Engineered IL-1R-I binding polypeptide
VDAKYAKEVEHAQMEIFSLPNLTRKQYTAFIRKLLDDPSQSSELLSEAKKLNDSQAPK

SEQ ID NO: 327 - protein, 58 aa, synthetic construct
  REGION 1..58: note = Engineered IL-1R-I binding polypeptide
VDAKYAKEAEEAQYEIFKLPNLTRKQYTAFIRKLLDDPSQSSELLSEAKKLNDSQAPK

SEQ ID NO: 328 - protein, 58 aa, synthetic construct
  REGION 1..58: note = Engineered IL-1R-I binding polypeptide
VDAKYAKEVYHAQMEIFKLPNLTRKQYTAFIRKLFDDPSQSSELLSEAKKLNDSQAPK

SEQ ID NO: 329 - protein, 58 aa, synthetic construct
  REGION 1..58: note = Engineered IL-1R-I binding polypeptide
VDAKYAKEVEIAQLEIFALPNLTRKQYTAFIRKLLDDPSQSSELLSEAKKLNDSQAPK

SEQ ID NO: 330 - protein, 58 aa, synthetic construct
  REGION 1..58: note = Engineered IL-1R-I binding polypeptide
VDAKYAKELERAYAEIYALPNLTRKQYTAFIRKLLDDPSQSSELLSEAKKLNDSQAPK

SEQ ID NO: 331 - protein, 58 aa, synthetic construct
  REGION 1..58: note = Engineered IL-1R-I binding polypeptide
VDAKYAKEVDEAYMEIFNLPNLTRKQYTAFIRKLLDDPSQSSELLSEAKKLNDSQAPK

SEQ ID NO: 332 - protein, 58 aa, synthetic construct
  REGION 1..58: note = Engineered IL-1R-I binding polypeptide
VDAKYAKEFHRAYSEIYLLPNLTRKQYTAFIRKLFDDPSQSSELLSEAKKLNDSQAPK

SEQ ID NO: 333 - protein, 58 aa, synthetic construct
  REGION 1..58: note = Engineered IL-1R-I binding polypeptide
VDAKYAKEVELAQHEIFQLPNLTRKQYTAFIRKLFDDPSQSSELLSEAKKLNDSQAPK

SEQ ID NO: 334 - protein, 58 aa, synthetic construct
  REGION 1..58: note = Engineered IL-1R-I binding polypeptide
VDAKYAKEVESAQMEIFELPNLTRRQYTAFIRKLLDDPSQSSELLSEAKKLNDSQAPK

SEQ ID NO: 335 - protein, 58 aa, synthetic construct
  REGION 1..58: note = Engineered IL-1R-I binding polypeptide
VDAKYAKEAEIAYYEIYSLPNLTRRQYTAFIRKLLDDPSQSSELLSEAKKLNDSQAPK

SEQ ID NO: 336 - protein, 58 aa, synthetic construct
  REGION 1..58: note = Engineered IL-1R-I binding polypeptide
VDAKYAKEVEDAYFEIYGLPNLTRKQYTAFIRKLLDDPSQSSELLSEAKKLNDSQAPK

SEQ ID NO: 337 - protein, 58 aa, synthetic construct
  REGION 1..58: note = Engineered IL-1R-I binding polypeptide
VDAKYAKETFKAQQEIFALPNLTRRQYTAFIRKLLDDPSQSSELLSEAKKLNDSQAPK

SEQ ID NO: 338 - protein, 58 aa, synthetic construct
  REGION 1..58: note = Engineered IL-1R-I binding polypeptide
VDAKYAKEAEQAYWEIFSLPNLTRKQYTAFIRKLLDDPSQSSELLSEAKKLNDSQAPK

SEQ ID NO: 339 - protein, 58 aa, synthetic construct
  REGION 1..58: note = Engineered IL-1R-I binding polypeptide
VDAKYAKEVVQAYDEIYGLPNLTRKQYTAFIRKLLDDPSQSSELLSEAKKLNDSQAPK

SEQ ID NO: 340 - protein, 58 aa, synthetic construct
  REGION 1..58: note = Engineered IL-1R-I binding polypeptide
VDAKYAKEASDAYEEIYALPNLTRKQYTAFIRKLLDDPSQSSELLSEAKKLNDSQAPK

SEQ ID NO: 341 - protein, 58 aa, synthetic construct
  REGION 1..58: note = Engineered IL-1R-I binding polypeptide
VDAKYAKEIEAAQMEIFRLPNLTRKQYTAFIRKLLDDPSQSSELLSEAKKLNDSQAPK

SEQ ID NO: 342 - protein, 58 aa, synthetic construct
  REGION 1..58: note = Engineered IL-1R-I binding polypeptide
VDAKYAKEAEEAYFEIFALPNLTRKQYTAFIRKLLDDPSQSSELLSEAKKLNDSQAPK

SEQ ID NO: 343 - protein, 58 aa, synthetic construct
  REGION 1..58: note = Engineered IL-1R-I binding polypeptide
VDAKYAKEVEHAQYEIFQLPNLTRKQYTAFIRKLLDDPSQSSELLSEAKKLNDSQAPK

SEQ ID NO: 344 - protein, 58 aa, synthetic construct
  REGION 1..58: note = Engineered IL-1R-I binding polypeptide
VDAKYAKEAEKAQMEIFALPNLTRKQYTAFIRKLLDDPSQSSELLSEAKKLNDSQAPK

SEQ ID NO: 345 - protein, 58 aa, synthetic construct
  REGION 1..58: note = Engineered IL-1R-I binding polypeptide
VDAKYAKEVDAAYMEIFNLPNLTRKQYTAFIRKLLDDPSQSSELLSEAKKLNDSQAPK

SEQ ID NO: 346 - protein, 58 aa, synthetic construct
  REGION 1..58: note = Engineered IL-1R-I binding polypeptide
VDAKYAKEVEIAQMEIYNLPNLTRKQYTAFIIKLLDDPSQSSELLSEAKKLNDSQAPK

SEQ ID NO: 347 - protein, 58 aa, synthetic construct
  REGION 1..58: note = Engineered IL-1R-I binding polypeptide
VDAKYAKEVENAYFEIYQLPNLTRKQYTAFIRKLLDDPSQSSELLSEAKKLNDSQAPK

SEQ ID NO: 348 - protein, 58 aa, synthetic construct
  REGION 1..58: note = Engineered IL-1R-I binding polypeptide
VDAKYAKEVEDAYFEIYELPNLTRKQYTAFIRKLLDDPSQSSELLSEAKKLNDSQAPK

SEQ ID NO: 349 - protein, 58 aa, synthetic construct
  REGION 1..58: note = Engineered IL-1R-I binding polypeptide
VDAKYAKEVEKAYFEIYQLPNLTRKQYTAFIRKLLDDPSQSSELLSEAKKLNDSQAPK

SEQ ID NO: 350 - protein, 58 aa, synthetic construct
  REGION 1..58: note = Engineered IL-1R-I binding polypeptide
VDAKYAKEIEAAQMEIFALPNLTRKQYTAFIRKLLDDPSQSSELLSEAKKLNDSQAPK

SEQ ID NO: 351 - protein, 58 aa, synthetic construct
  REGION 1..58: note = Engineered IL-1R-I binding polypeptide
VDAKYAKETWYAQMEIFSLPNLTRKQYTAFIRKLLDDPSQSSELLSEAKKLNDSQAPK

SEQ ID NO: 352 - protein, 58 aa, synthetic construct
  REGION 1..58: note = Engineered IL-1R-I binding polypeptide
VDAKYAKEIERAQMEIFSLPNLTRKQYTAFIRKLLDDPSQSSELLSEAKKLNDSQAPK

SEQ ID NO: 353 - protein, 58 aa, synthetic construct
  REGION 1..58: note = Engineered IL-1R-I binding polypeptide
VDAKYAKEVDDAYMEIYYLPNLTRKQYTAFIRKLLDDPSQSSELLSEAKKLNDSQAPK

SEQ ID NO: 354 - protein, 58 aa, synthetic construct
  REGION 1..58: note = Engineered IL-1R-I binding polypeptide
VDAKYAKEVEAAYVEIYHLPNLTRKQYTAFIRKLLDDPSQSSELLSEAKKLNDSQAPK

SEQ ID NO: 355 - protein, 58 aa, synthetic construct
  REGION 1..58: note = Engineered IL-1R-I binding polypeptide
VDAKYAKEFSEAYFEIYSLPNLTRKQYTAFIRKLFDDPSQSSELLSEAKKLNDSQAPK

SEQ ID NO: 356 - protein, 58 aa, synthetic construct
  REGION 1..58: note = Engineered IL-1R-I binding polypeptide
VDAKYAKEVAKAQMEIFKLPNLTRKQYTAFIRKLLDDPSQSSELLSEAKKLNDSQAPK

SEQ ID NO: 357 - protein, 58 aa, synthetic construct
  REGION 1..58: note = Engineered IL-1R-I binding polypeptide
VDAKYAKEVEYAQMEIYSLPNLTRRQYTAFIRKLLDDPSQSSELLSEAKKLNDSQAPK

SEQ ID NO: 358 - protein, 58 aa, synthetic construct
  REGION 1..58: note = Engineered IL-1R-I binding polypeptide
VDAKYAKEAESAYWEIYHLPNLTRKQYTAFIRKLLDDPSQSSELLSEAKKLNDSQAPK

SEQ ID NO: 359 - protein, 58 aa, synthetic construct
  REGION 1..58: note = Engineered IL-1R-I binding polypeptide
VDAKYAKEVERAQMEIFELPNLTRRQYTAFIRKLLDDPSQSSELLSEAKKLNDSQAPK

SEQ ID NO: 360 - protein, 58 aa, synthetic construct
  REGION 1..58: note = Engineered IL-1R-I binding polypeptide
VDAKYAKEVEEAYMEIYNLPNLTRKQYTAFIRKLLDDPSQSSELLSEAKKLNDSQAPK

SEQ ID NO: 361 - protein, 58 aa, synthetic construct
  REGION 1..58: note = Engineered IL-1R-I binding polypeptide
VDAKYAKEIEVAQMEIYSLPNLTRKQYTAFIRKLFDDPSQSSELLSEAKKLNDSQAPK

SEQ ID NO: 362 - protein, 58 aa, synthetic construct
  REGION 1..58: note = Engineered IL-1R-I binding polypeptide
VDAKYAKEVRIAQFEIFALPNLTRKQYTAFIRKLFDDPSQSSELLSEAKKLNDSQAPK

SEQ ID NO: 363 - protein, 58 aa, synthetic construct
  REGION 1..58: note = Engineered IL-1R-I binding polypeptide
VDAKYAKEVEQAQHEIFNLPNLTRKQYTAFIRKLLDDPSQSSELLSEAKKLNDSQAPK

SEQ ID NO: 364 - protein, 58 aa, synthetic construct
  REGION 1..58: note = Engineered IL-1R-I binding polypeptide
VDAKYAKEAVSAYWEIFALPNLTRRQYTAFIRKLLDDPSQSSELLSEAKKLNDSQAPK

SEQ ID NO: 365 - protein, 58 aa, synthetic construct
  REGION 1..58: note = Engineered IL-1R-I binding polypeptide
VDAKYAKETEEAQMEIFYLPNLTRRQYTAFIRKLLDDPSQSSELLSEAKKLNDSQAPK

SEQ ID NO: 366 - protein, 58 aa, synthetic construct
  REGION 1..58: note = Engineered IL-1R-I binding polypeptide
VDAKYAKEADAAYMEIFGLPNLTRKQYTAFIRKLLDDPSQSSELLSEAKKLNDSQAPK

SEQ ID NO: 367 - protein, 58 aa, synthetic construct
  REGION 1..58: note = Engineered IL-1R-I binding polypeptide
VDAKYAKETAAAQAEIFNLPNLTRKQYTAFIRKLFDDPSQSSELLSEAKKLNDSQAPK

SEQ ID NO: 368 - protein, 58 aa, synthetic construct
  REGION 1..58: note = Engineered IL-1R-I binding polypeptide
VDAKYAKEAFDAYWEIYRLPNLTRKQYTAFIRKLLDDPSQSSELLSEAKKLNDSQAPK

SEQ ID NO: 369 - protein, 58 aa, synthetic construct
  REGION 1..58: note = Engineered IL-1R-I binding polypeptide
VDAKYAKEIEAAYAEIYQLPNLTRKQYTAFIRKLLDDPSQSSELLSEAKKLNDSQAPK

SEQ ID NO: 370 - protein, 58 aa, synthetic construct
  REGION 1..58: note = Engineered IL-1R-I binding polypeptide
VDAKYAKEVIDAYFEIFHLPNLTRKQYTAFIRKLLDDPSQSSELLSEAKKLNDSQAPK

SEQ ID NO: 371 - protein, 58 aa, synthetic construct
  REGION 1..58: note = Engineered IL-1R-I binding polypeptide
VDAKYAKEVESAQMEIYRLPNLTRRQYTAFIRKLLDDPSQSSELLSEAKKLNDSQAPK

SEQ ID NO: 372 - protein, 58 aa, synthetic construct
  REGION 1..58: note = Engineered IL-1R-I binding polypeptide
VDAKYAKETEEAYQEIFDLPNLTRKQYTAFIRKLLDDPSQSSELLSEAKKLNDSQAPK

SEQ ID NO: 373 - protein, 58 aa, synthetic construct
  REGION 1..58: note = Engineered IL-1R-I binding polypeptide
VDAKYAKEVEIAQMEIYSLPNLTRKQYTAFIRKLLDDPSQSSELLSEAKKLNDSQAPK

SEQ ID NO: 374 - protein, 58 aa, synthetic construct
  REGION 1..58: note = Engineered IL-1R-I binding polypeptide
VDAKYAKEVEEAQMEIFFLPNLTRKQYTAFIIKLFDDPSQSSELLSEAKKLNDSQAPK

SEQ ID NO: 375 - protein, 58 aa, synthetic construct
  REGION 1..58: note = Engineered IL-1R-I binding polypeptide
VDAKYAKEIEIAQMEIYYLPNLTRKQYTAFIRKLLDDPSQSSELLSEAKKLNDSQAPK

SEQ ID NO: 376 - protein, 58 aa, synthetic construct
  REGION 1..58: note = Engineered IL-1R-I binding polypeptide
VDAKYAKETYWAQQEIFYLPNLTRKQYTAFIRKLLDDPSQSSELLSEAKKLNDSQAPK

SEQ ID NO: 377 - protein, 58 aa, synthetic construct
  REGION 1..58: note = Engineered IL-1R-I binding polypeptide
VDAKYAKEAESAQMEIYALPNLTRKQYTAFIRKLLDDPSQSSELLSEAKKLNDSQAPK

SEQ ID NO: 378 - protein, 58 aa, synthetic construct
  REGION 1..58: note = Engineered IL-1R-I binding polypeptide
VDAKYAKELETAYFEIYELPNLTRKQYTAFIRKLLDDPSQSSELLSEAKKLNDSQAPK

SEQ ID NO: 379 - protein, 58 aa, synthetic construct
  REGION 1..58: note = Engineered IL-1R-I binding polypeptide
VDAKYAKEVEDAQMEIFYLPNLTRKQYTAFIRKLLDDPSQSSELLSEAKKLNDSQAPK

SEQ ID NO: 380 - protein, 58 aa, synthetic construct
  REGION 1..58: note = Engineered IL-1R-I binding polypeptide
VDAKYAKELELAYQEIYALPNLTRRQYTAFIRKLLDDPSQSSELLSEAKKLNDSQAPK

SEQ ID NO: 381 - protein, 58 aa, synthetic construct
  REGION 1..58: note = Engineered IL-1R-I binding polypeptide
VDAKYAKEIVAAYWEIYYLPNLTRKQYTAFIRKLLDDPSQSSELLSEAKKLNDSQAPK

SEQ ID NO: 382 - protein, 58 aa, synthetic construct
  REGION 1..58: note = Engineered IL-1R-I binding polypeptide
VDAKYAKEVEEAYMEIYALPNLTRKQYTAFIRKLLDDPSQSSELLSEAKKLNDSQAPK

SEQ ID NO: 383 - protein, 58 aa, synthetic construct
  REGION 1..58: note = Engineered IL-1R-I binding polypeptide
VDAKYAKEIDSAYFEIYALPNLTRKQYTAFIRKLLDDPSQSSELLSEAKKLNDSQAPK

SEQ ID NO: 384 - protein, 58 aa, synthetic construct
  REGION 1..58: note = Engineered IL-1R-I binding polypeptide
VDAKYAKEAEQAYQEIYELPNLTRKQYTAFIRKLLDDPSQSSELLSEAKKLNDSQAPK

SEQ ID NO: 385 - protein, 58 aa, synthetic construct
  REGION 1..58: note = Engineered IL-1R-I binding polypeptide
VDAKYAKEAYRAQMEIFELPNLTRKQYTAFIRKLLDDPSQSSELLSEAKKLNDSQAPK

SEQ ID NO: 386 - protein, 58 aa, synthetic construct
  REGION 1..58: note = Engineered IL-1R-I binding polypeptide
VDAKYAKEVEDAYFEIYALPNLTRKQYTAFIRKLLDDPSQSSELLSEAKKLNDSQAPK

SEQ ID NO: 387 - protein, 58 aa, synthetic construct
  REGION 1..58: note = Engineered IL-1R-I binding polypeptide
VDAKYAKEIEAAQMEIFYLPNLTRKQYTAFIRKLFDDPSQSSELLSEAKKLNDSQAPK

SEQ ID NO: 388 - protein, 58 aa, synthetic construct
  REGION 1..58: note = Engineered IL-1R-I binding polypeptide
VDAKYAKEAYEAQMEIFELPNLTRKQYTAFIRKLLDDPSQSSELLSEAKKLNDSQAPK

SEQ ID NO: 389 - protein, 58 aa, synthetic construct
  REGION 1..58: note = Engineered IL-1R-I binding polypeptide
VDAKYAKEVVDAYFEIYELPNLTRKQYTAFIRKLLDDPSQSSELLSEAKKLNDSQAPK

SEQ ID NO: 390 - protein, 58 aa, synthetic construct
  REGION 1..58: note = Engineered IL-1R-I binding polypeptide
VDAKYAKEVEQAQMEIFKLPNLTRKQYTAFIRKLFDDPSQSSELLSEAKKLNDSQAPK

SEQ ID NO: 391 - protein, 58 aa, synthetic construct
  REGION 1..58: note = Engineered IL-1R-I binding polypeptide
VDAKYAKETEKAQMEIFELPNLTRKQYTAFIRKLLDDPSQSSELLSEAKKLNDSQAPK

SEQ ID NO: 392 - protein, 58 aa, synthetic construct
  REGION 1..58: note = Engineered IL-1R-I binding polypeptide
VDAKYAKETYQAQMEIFGLPNLTRRQYTAFIRKLLDDPSQSSELLSEAKKLNDSQAPK

SEQ ID NO: 393 - protein, 58 aa, synthetic construct
  REGION 1..58: note = Engineered IL-1R-I binding polypeptide
VDAKYAKEVESAQMEIFALPNLTRKQYTAFIIKLLDDPSQSSELLSEAKKLNDSQAPK

SEQ ID NO: 394 - protein, 58 aa, synthetic construct
  REGION 1..58: note = Engineered IL-1R-I binding polypeptide
VDAKYAKEIEDAQMEIFGLPNLTRRQYTAFIRKLLDDPSQSSELLSEAKKLNDSQAPK

SEQ ID NO: 395 - protein, 58 aa, synthetic construct
  REGION 1..58: note = Engineered IL-1R-I binding polypeptide
VDAKYAKEVEKAQLEIFALPNLTRKQYTAFIRKLFDDPSQSSELLSEAKKLNDSQAPK

SEQ ID NO: 396 - protein, 58 aa, synthetic construct
  REGION 1..58: note = Engineered IL-1R-I binding polypeptide
VDAKYAKEIEQAQFEIFYLPNLTRKQYTAFIRKLLDDPSQSSELLSEAKKLNDSQAPK

SEQ ID NO: 397 - protein, 58 aa, synthetic construct
  REGION 1..58: note = Engineered IL-1R-I binding polypeptide
VDAKYAKETEVAQMEIFKLPNLTRKQYTAFIIKLFDDPSQSSELLSEAKKLNDSQAPK

SEQ ID NO: 398 - protein, 58 aa, synthetic construct
  REGION 1..58: note = Engineered IL-1R-I binding polypeptide
VDAKYAKEVEQAQMEIFELPNLTRKQYTAFIRKLLDDPSQSSELLSEAKKLNDSQAPK

SEQ ID NO: 399 - protein, 58 aa, synthetic construct
  REGION 1..58: note = Engineered IL-1R-I binding polypeptide
VDAKYAKEVEIAQHEIFELPNLTRKQYTAFIRKLLDDPSQSSELLSEAKKLNDSQAPK

SEQ ID NO: 400 - protein, 58 aa, synthetic construct
  REGION 1..58: note = Engineered IL-1R-I binding polypeptide
VDAKYAKEVELAYMEIYKLPNLTRKQYTAFIRKLLDDPSQSSELLSEAKKLNDSQAPK

SEQ ID NO: 401 - protein, 58 aa, synthetic construct
  REGION 1..58: note = Engineered IL-1R-I binding polypeptide
VDAKYAKEVVQAYDEIFQLPNLTRKQYTAFIRKLLDDPSQSSELLSEAKKLNDSQAPK

SEQ ID NO: 402 - protein, 58 aa, synthetic construct
  REGION 1..58: note = Engineered IL-1R-I binding polypeptide
VDAKYAKEVEEAQMEIFNLPNLTRKQYTAFIRKLFDDPSQSSELLSEAKKLNDSQAPK

SEQ ID NO: 403 - protein, 58 aa, synthetic construct
  REGION 1..58: note = Engineered IL-1R-I binding polypeptide
VDAKYAKEVEEAQMEIYNLPNLTRKQYTAFIRKLLDDPSQSSELLSEAKKLNDSQAPK

SEQ ID NO: 404 - protein, 58 aa, synthetic construct
  REGION 1..58: note = Engineered IL-1R-I binding polypeptide
VDAKYAKEVEKAQMEIFDLPNLTRKQYTAFIRKLFDDPSQSSELLSEAKKLNDSQAPK

SEQ ID NO: 405 - protein, 58 aa, synthetic construct
  REGION 1..58: note = Engineered IL-1R-I binding polypeptide
VDAKYAKEVEEAYWEIYALPNLTRKQYTAFIRKLLDDPSQSSELLSEAKKLNDSQAPK

SEQ ID NO: 406 - protein, 58 aa, synthetic construct
  REGION 1..58: note = Engineered IL-1R-I binding polypeptide
VDAKYAKEAETAYHEIYILPNLTRKQYTAFIRKLLDDPSQSSELLSEAKKLNDSQAPK

SEQ ID NO: 407 - protein, 58 aa, synthetic construct
  REGION 1..58: note = Engineered IL-1R-I binding polypeptide
VDAKYAKEAEEAQMEIYNLPNLTRKQYTAFIRKLLDDPSQSSELLSEAKKLNDSQAPK

SEQ ID NO: 408 - protein, 58 aa, synthetic construct
  REGION 1..58: note = Engineered IL-1R-I binding polypeptide
VDAKYAKEVEFAYFEIYALPNLTRKQYTAFIRKLLDDPSQSSELLSEAKKLNDSQAPK

SEQ ID NO: 409 - protein, 58 aa, synthetic construct
  REGION 1..58: note = Engineered IL-1R-I binding polypeptide
VDAKYAKEARQAYWEIYSLPNLTRKQYTAFIRKLLDDPSQSSELLSEAKKLNDSQAPK

SEQ ID NO: 410 - protein, 58 aa, synthetic construct
  REGION 1..58: note = Engineered IL-1R-I binding polypeptide
VDAKYAKETETAQLEIFALPNLTRKQYTAFIRKLLDDPSQSSELLSEAKKLNDSQAPK

SEQ ID NO: 411 - protein, 58 aa, synthetic construct
  REGION 1..58: note = Engineered IL-1R-I binding polypeptide
VDAKYAKEIEEAQHEIFRLPNLTRKQYTAFIRKLFDDPSQSSELLSEAKKLNDSQAPK

SEQ ID NO: 412 - protein, 58 aa, synthetic construct
  REGION 1..58: note = Engineered IL-1R-I binding polypeptide
VDAKYAKEVSNAYMEIYKLPNLTRKQYTAFIRKLLDDPSQSSELLSEAKKLNDSQAPK

SEQ ID NO: 413 - protein, 58 aa, synthetic construct
  REGION 1..58: note = Engineered IL-1R-I binding polypeptide
VDAKYAKEIEEAQMEIYELPNLTRKQYTAFIRKLLDDPSQSSELLSEAKKLNDSQAPK

SEQ ID NO: 414 - protein, 58 aa, synthetic construct
  REGION 1..58: note = Engineered IL-1R-I binding polypeptide
VDAKYAKEVTDAQMEIFALPNLTRKQYTAFIRKLLDDPSQSSELLSEAKKLNDSQAPK

SEQ ID NO: 415 - protein, 58 aa, synthetic construct
  REGION 1..58: note = Engineered IL-1R-I binding polypeptide
VDAKYAKEIEHAQLEIFSLPNLTRKQYTAFIRKLLDDPSQSSELLSEAKKLNDSQAPK

SEQ ID NO: 416 - protein, 58 aa, synthetic construct
  REGION 1..58: note = Engineered IL-1R-I binding polypeptide
VDAKYAKEVEQAQMEIFNLPNLTRKQYTAFIRKLLDDPSQSSELLSEAKKLNDSQAPK

SEQ ID NO: 417 - protein, 58 aa, synthetic construct
  REGION 1..58: note = Engineered IL-1R-I binding polypeptide
VDAKYAKEAEWAQMEIFSLPNLTRKQYTAFIRKLLDDPSQSSELLSEAKKLNDSQAPK

SEQ ID NO: 418 - protein, 58 aa, synthetic construct
  REGION 1..58: note = Engineered IL-1R-I binding polypeptide
VDAKYAKEVHAAQMEIFELPNLTRKQYTAFIRKLLDDPSQSSELLSEAKKLNDSQAPK

SEQ ID NO: 419 - protein, 58 aa, synthetic construct
  REGION 1..58: note = Engineered IL-1R-I binding polypeptide
VDAKYAKEVEFAQMEIYYLPNLTRKQYTAFIRKLLDDPSQSSELLSEAKKLNDSQAPK

SEQ ID NO: 420 - protein, 58 aa, synthetic construct
  REGION 1..58: note = Engineered IL-1R-I binding polypeptide
VDAKYAKEVIDAYFEIYELPNLTRKQYTAFIRKLLDDPSQSSELLSEAKKLNDSQAPK

SEQ ID NO: 421 - protein, 58 aa, synthetic construct
  REGION 1..58: note = Engineered IL-1R-I binding polypeptide
VDAKYAKEVEDAYMEIYDLPNLTRKQYTAFIRKLLDDPSQSSELLSEAKKLNDSQAPK

SEQ ID NO: 422 - protein, 58 aa, synthetic construct
  REGION 1..58: note = Engineered IL-1R-I binding polypeptide
VDAKYAKEVEAAQLEIFALPNLTRKQYTAFIRKLFDDPSQSSELLSEAKKLNDSQAPK

SEQ ID NO: 423 - protein, 58 aa, synthetic construct
  REGION 1..58: note = Engineered IL-1R-I binding polypeptide
VDAKYAKETVAAYWEIYALPNLTRKQYTAFIRKLLDDPSQSSELLSEAKKLNDSQAPK

SEQ ID NO: 424 - protein, 58 aa, synthetic construct
  REGION 1..58: note = Engineered IL-1R-I binding polypeptide
VDAKYAKEVVDAYWEIYALPNLTRKQYTAFIRKLLDDPSQSSELLSEAKKLNDSQAPK

SEQ ID NO: 425 - protein, 58 aa, synthetic construct
  REGION 1..58: note = Engineered IL-1R-I binding polypeptide
VDAKYAKETEEAYWEIYGLPNLTRKQYTAFIRKLLDDPSQSSELLSEAKKLNDSQAPK

SEQ ID NO: 426 - protein, 58 aa, synthetic construct
  REGION 1..58: note = Engineered IL-1R-I binding polypeptide
VDAKYAKEVETAYFEIYHLPNLTRKQYTAFIRKLLDDPSQSSELLSEAKKLNDSQAPK

SEQ ID NO: 427 - protein, 58 aa, synthetic construct
  REGION 1..58: note = Engineered IL-1R-I binding polypeptide
VDAKYAKEVVDAYYEIYELPNLTRKQYTAFIRKLLDDPSQSSELLSEAKKLNDSQAPK

SEQ ID NO: 428 - protein, 58 aa, synthetic construct
  REGION 1..58: note = Engineered IL-1R-I binding polypeptide
VDAKYAKEVQEAYMEIFQLPNLTRKQYTAFIRKLLDDPSQSSELLSEAKKLNDSQAPK

SEQ ID NO: 429 - protein, 58 aa, synthetic construct
  REGION 1..58: note = Engineered IL-1R-I binding polypeptide
VDAKYAKEVEDAYYEIYSLPNLTRKQYTAFIRKLLDDPSQSSELLSEAKKLNDSQAPK

SEQ ID NO: 430 - protein, 58 aa, synthetic construct
  REGION 1..58: note = Engineered IL-1R-I binding polypeptide
VDAKYAKEVVEAYDEIFRLPNLTRKQYTAFIRKLLDDPSQSSELLSEAKKLNDSQAPK

SEQ ID NO: 431 - protein, 58 aa, synthetic construct
  REGION 1..58: note = Engineered IL-1R-I binding polypeptide
VDAKYAKETEEAQMEIFNLPNLTRKQYTAFIRKLLDDPSQSSELLSEAKKLNDSQAPK

SEQ ID NO: 432 - protein, 58 aa, synthetic construct
  REGION 1..58: note = Engineered IL-1R-I binding polypeptide
VDAKYAKEVIDAYDEIYDLPNLTRKQYTAFIRKLLDDPSQSSELLSEAKKLNDSQAPK

SEQ ID NO: 433 - protein, 58 aa, synthetic construct
  REGION 1..58: note = Engineered IL-1R-I binding polypeptide
VDAKYAKEVVDAYYEIYALPNLTRKQYTAFIRKLLDDPSQSSELLSEAKKLNDSQAPK

SEQ ID NO: 434 - protein, 58 aa, synthetic construct
  REGION 1..58: note = Engineered IL-1R-I binding polypeptide
VDAKYAKEVEEAYFEIYHLPNLTRKQYTAFIRKLLDDPSQSSELLSEAKKLNDSQAPK

SEQ ID NO: 435 - protein, 58 aa, synthetic construct
  REGION 1..58: note = Engineered IL-1R-I binding polypeptide
VDAKYAKEVESAYMEIFALPNLTRKQYTAFIRKLLDDPSQSSELLSEAKKLNDSQAPK

SEQ ID NO: 436 - protein, 58 aa, synthetic construct
  REGION 1..58: note = Engineered IL-1R-I binding polypeptide
VDAKYAKEVEDAYWEIYALPNLTRKQYTAFIRKLLDDPSQSSELLSEAKKLNDSQAPK

SEQ ID NO: 437 - protein, 58 aa, synthetic construct
  REGION 1..58: note = Engineered IL-1R-I binding polypeptide
VDAKYAKEAESAYFEIYALPNLTRKQYTAFIRKLLDDPSQSSELLSEAKKLNDSQAPK

SEQ ID NO: 438 - protein, 58 aa, synthetic construct
  REGION 1..58: note = Engineered IL-1R-I binding polypeptide
VDAKYAKEVEEAYMEIYQLPNLTRKQYTAFIRKLLDDPSQSSELLSEAKKLNDSQAPK

SEQ ID NO: 439 - protein, 58 aa, synthetic construct
  REGION 1..58: note = Engineered IL-1R-I binding polypeptide
VDAKYAKEVEHAYFEIYKLPNLTRKQYTAFIRKLLDDPSQSSELLSEAKKLNDSQAPK

SEQ ID NO: 440 - protein, 58 aa, synthetic construct
  REGION 1..58: note = Engineered IL-1R-I binding polypeptide
VDAKYAKEVETAYFEIFALPNLTRKQYTAFIRKLLDDPSQSSELLSEAKKLNDSQAPK

SEQ ID NO: 441 - protein, 58 aa, synthetic construct
  REGION 1..58: note = Engineered IL-1R-I binding polypeptide
VDAKYAKEVEDAYMEIFKLPNLTRKQYTAFIRKLLDDPSQSSELLSEAKKLNDSQAPK

SEQ ID NO: 442 - protein, 58 aa, synthetic construct
  REGION 1..58: note = Engineered IL-1R-I binding polypeptide
VDAKYAKEAHDAYWEIYSLPNLTRKQYTAFIRKLLDDPSQSSELLSEAKKLNDSQAPK

SEQ ID NO: 443 - protein, 58 aa, synthetic construct
  REGION 1..58: note = Engineered IL-1R-I binding polypeptide
VDAKYAKEVEDAYMEIYRLPNLTRKQYTAFIRKLLDDPSQSSELLSEAKKLNDSQAPK

SEQ ID NO: 444 - protein, 58 aa, synthetic construct
  REGION 1..58: note = Engineered IL-1R-I binding polypeptide
VDAKYAKEVEEAYEEIYQLPNLTRKQYTAFIRKLLDDPSQSSELLSEAKKLNDSQAPK

SEQ ID NO: 445 - protein, 58 aa, synthetic construct
  REGION 1..58: note = Engineered IL-1R-I binding polypeptide
VDAKYAKEVEIAYMEIYQLPNLTRKQYTAFIRKLLDDPSQSSELLSEAKKLNDSQAPK

SEQ ID NO: 446 - protein, 58 aa, synthetic construct
  REGION 1..58: note = Engineered IL-1R-I binding polypeptide
VDAKYAKEVEQAYFEIYGLPNLTRKQYTAFIRKLLDDPSQSSELLSEAKKLNDSQAPK

SEQ ID NO: 447 - protein, 58 aa, synthetic construct
  REGION 1..58: note = Engineered IL-1R-I binding polypeptide
VDAKYAKEVEEAYMEIYELPNLTRKQYTAFIRKLLDDPSQSSELLSEAKKLNDSQAPK

SEQ ID NO: 448 - protein, 58 aa, synthetic construct
  REGION 1..58: note = Engineered IL-1R-I binding polypeptide
VDAKYAKEVEEAYYEIYLLPNLTRKQYTAFIRKLLDDPSQSSELLSEAKKLNDSQAPK

SEQ ID NO: 449 - protein, 58 aa, synthetic construct
  REGION 1..58: note = Engineered IL-1R-I binding polypeptide
VDAKYAKETEDAYMEIYALPNLTRKQYTAFIRKLLDDPSQSSELLSEAKKLNDSQAPK

SEQ ID NO: 450 - protein, 58 aa, synthetic construct
  REGION 1..58: note = Engineered IL-1R-I binding polypeptide
VDAKYAKEVEHAYFEIFGLPNLTRKQYTAFIRKLLDDPSQSSELLSEAKKLNDSQAPK

SEQ ID NO: 451 - protein, 58 aa, synthetic construct
  REGION 1..58: note = Engineered IL-1R-I binding polypeptide
VDAKYAKEVEEAYFEIYELPNLTRKQYTAFIRKLLDDPSQSSELLSEAKKLNDSQAPK

SEQ ID NO: 452 - protein, 58 aa, synthetic construct
  REGION 1..58: note = Engineered IL-1R-I binding polypeptide
VDAKYAKEVETAYMEIFYLPNLTRKQYTAFIRKLLDDPSQSSELLSEAKKLNDSQAPK

SEQ ID NO: 453 - protein, 58 aa, synthetic construct
  REGION 1..58: note = Engineered IL-1R-I binding polypeptide
VDAKYAKEVEDAYMEIYHLPNLTRKQYTAFIRKLLDDPSQSSELLSEAKKLNDSQAPK

SEQ ID NO: 454 - protein, 58 aa, synthetic construct
  REGION 1..58: note = Engineered IL-1R-I binding polypeptide
VDAKYAKEIEEAYMEIYQLPNLTRKQYTAFIRKLLDDPSQSSELLSEAKKLNDSQAPK

SEQ ID NO: 455 - protein, 58 aa, synthetic construct
  REGION 1..58: note = Engineered IL-1R-I binding polypeptide
VDAKYAKEVEDAYFEIYTLPNLTRKQYTAFIRKLLDDPSQSSELLSEAKKLNDSQAPK

SEQ ID NO: 456 - protein, 58 aa, synthetic construct
  REGION 1..58: note = Engineered IL-1R-I binding polypeptide
VDAKYAKEVEEAYFEIFKLPNLTRKQYTAFIRKLLDDPSQSSELLSEAKKLNDSQAPK

SEQ ID NO: 457 - protein, 58 aa, synthetic construct
  REGION 1..58: note = Engineered IL-1R-I binding polypeptide
VDAKYAKEAEKAYWEIYALPNLTRKQYTAFIRKLLDDPSQSSELLSEAKKLNDSQAPK

SEQ ID NO: 458 - protein, 58 aa, synthetic construct
  REGION 1..58: note = Engineered IL-1R-I binding polypeptide
VDAKYAKEVEVAYFEIFALPNLTRKQYTAFIRKLLDDPSQSSELLSEAKKLNDSQAPK

SEQ ID NO: 459 - protein, 58 aa, synthetic construct
  REGION 1..58: note = Engineered IL-1R-I binding polypeptide
VDAKYAKEVEEAYFEIFELPNLTRKQYTAFIRKLLDDPSQSSELLSEAKKLNDSQAPK

SEQ ID NO: 460 - protein, 58 aa, synthetic construct
  REGION 1..58: note = Engineered IL-1R-I binding polypeptide
VDAKYAKEVTDAYMEIFHLPNLTRKQYTAFIRKLLDDPSQSSELLSEAKKLNDSQAPK

SEQ ID NO: 461 - protein, 58 aa, synthetic construct
  REGION 1..58: note = Engineered IL-1R-I binding polypeptide
VDAKYAKEVEVAYWEIFELPNLTRKQYTAFIRKLLDDPSQSSELLSEAKKLNDSQAPK

SEQ ID NO: 462 - protein, 58 aa, synthetic construct
  REGION 1..58: note = Engineered IL-1R-I binding polypeptide
VDAKYAKEVEYAYFEIYELPNLTRKQYTAFIRKLLDDPSQSSELLSEAKKLNDSQAPK

SEQ ID NO: 463 - protein, 58 aa, synthetic construct
  REGION 1..58: note = Engineered IL-1R-I binding polypeptide
VDAKYAKEVEAAYMEIFYLPNLTRKQYTAFIRKLLDDPSQSSELLSEAKKLNDSQAPK

SEQ ID NO: 464 - protein, 58 aa, synthetic construct
  REGION 1..58: note = Engineered IL-1R-I binding polypeptide
VDAKYAKEVEDAYWEIFHLPNLTRKQYTAFIRKLLDDPSQSSELLSEAKKLNDSQAPK

SEQ ID NO: 465 - protein, 58 aa, synthetic construct
  REGION 1..58: note = Engineered IL-1R-I binding polypeptide
VDAKYAKEVVDAYYEIFELPNLTRKQYTAFIRKLLDDPSQSSELLSEAKKLNDSQAPK

SEQ ID NO: 466 - protein, 58 aa, synthetic construct
  REGION 1..58: note = Engineered IL-1R-I binding polypeptide
VDAKYAKEATAAYMEIYFLPNLTRKQYTAFIRKLLDDPSQSSELLSEAKKLNDSQAPK

SEQ ID NO: 467 - protein, 58 aa, synthetic construct
  REGION 1..58: note = Engineered IL-1R-I binding polypeptide
VDAKYAKEASDAYQEIYALPNLTRKQYTAFIRKLLDDPSQSSELLSEAKKLNDSQAPK

SEQ ID NO: 468 - protein, 58 aa, synthetic construct
  REGION 1..58: note = Engineered IL-1R-I binding polypeptide
VDAKYAKEAQTAYWEIYKLPNLTRKQYTAFIRKLLDDPSQSSELLSEAKKLNDSQAPK

SEQ ID NO: 469 - protein, 58 aa, synthetic construct
  REGION 1..58: note = Engineered IL-1R-I binding polypeptide
VDAKYAKETVDAYWEIYALPNLTRKQYTAFIRKLLDDPSQSSELLSEAKKLNDSQAPK

SEQ ID NO: 470 - protein, 58 aa, synthetic construct
  REGION 1..58: note = Engineered IL-1R-I binding polypeptide
VDAKYAKEVEDAYYEIYELPNLTRKQYTAFIRKLLDDPSQSSELLSEAKKLNDSQAPK

SEQ ID NO: 471 - protein, 58 aa, synthetic construct
  REGION 1..58: note = Engineered IL-1R-I binding polypeptide
VDAKYAKEVVEAYWEIYSLPNLTRKQYTAFIRKLLDDPSQSSELLSEAKKLNDSQAPK

SEQ ID NO: 472 - protein, 58 aa, synthetic construct
  REGION 1..58: note = Engineered IL-1R-I binding polypeptide
VDAKYAKEADEAYWEIYSLPNLTRKQYTAFIRKLLDDPSQSSELLSEAKKLNDSQAPK

SEQ ID NO: 473 - protein, 58 aa, synthetic construct
  REGION 1..58: note = Engineered IL-1R-I binding polypeptide
VDAKYAKEVEFAYFEIYNLPNLTRKQYTAFIRKLLDDPSQSSELLSEAKKLNDSQAPK

SEQ ID NO: 474 - protein, 58 aa, synthetic construct
  REGION 1..58: note = Engineered IL-1R-I binding polypeptide
VDAKYAKEVVDAYYEIYNLPNLTRKQYTAFIRKLLDDPSQSSELLSEAKKLNDSQAPK

SEQ ID NO: 475 - protein, 58 aa, synthetic construct
  REGION 1..58: note = Engineered IL-1R-I binding polypeptide
VDAKYAKEVEAAYFEIFSLPNLTRKQYTAFIRKLLDDPSQSSELLSEAKKLNDSQAPK

SEQ ID NO: 476 - protein, 58 aa, synthetic construct
  REGION 1..58: note = Engineered IL-1R-I binding polypeptide
VDAKYAKEVEDAYMEIFQLPNLTRKQYTAFIRKLLDDPSQSSELLSEAKKLNDSQAPK

SEQ ID NO: 477 - protein, 58 aa, synthetic construct
  REGION 1..58: note = Engineered IL-1R-I binding polypeptide
VDAKYAKEAELAYWEIYKLPNLTRKQYTAFIRKLLDDPSQSSELLSEAKKLNDSQAPK

SEQ ID NO: 478 - protein, 58 aa, synthetic construct
  REGION 1..58: note = Engineered IL-1R-I binding polypeptide
VDAKYAKEVEKAYMEIYYLPNLTRKQYTAFIRKLLDDPSQSSELLSEAKKLNDSQAPK

SEQ ID NO: 479 - protein, 58 aa, synthetic construct
  REGION 1..58: note = Engineered IL-1R-I binding polypeptide
VDAKYAKEQEFAYFEIYKLPNLTRKQYTAFIRKLLDDPSQSSELLSEAKKLNDSQAPK

SEQ ID NO: 480 - protein, 58 aa, synthetic construct
  REGION 1..58: note = Engineered IL-1R-I binding polypeptide
VDAKYAKELDAAYMEIYGLPNLTRRQYTAFIRKLLDDPSQSSELLSEAKKLNDSQAPK

SEQ ID NO: 481 - protein, 58 aa, synthetic construct
  REGION 1..58: note = Engineered IL-1R-I binding polypeptide
VDAKYAKEAEQAYYEIYELPNLTRKQYTAFIRKLLDDPSQSSELLSEAKKLNDSQAPK

SEQ ID NO: 482 - protein, 58 aa, synthetic construct
  REGION 1..58: note = Engineered IL-1R-I binding polypeptide
VDAKYAKEHVEAYFEIFSLPNLTRKQYTAFIRKLLDDPSQSSELLSEAKKLNDSQAPK

SEQ ID NO: 483 - protein, 58 aa, synthetic construct
  REGION 1..58: note = Engineered IL-1R-I binding polypeptide
VDAKYAKEVTAAYYEIFALPNLTRKQYTAFIRKLLDDPSQSSELLSEAKKLNDSQAPK

SEQ ID NO: 484 - protein, 58 aa, synthetic construct
  REGION 1..58: note = Engineered IL-1R-I binding polypeptide
VDAKYAKEVEIAYFEIYNLPNLTRRQYTAFIRKLLDDPSQSSELLSEAKKLNDSQAPK

SEQ ID NO: 485 - protein, 58 aa, synthetic construct
  REGION 1..58: note = Engineered IL-1R-I binding polypeptide
VDAKYAKEAQDAYFEIYELPNLTRKQYTAFIRKLLDDPSQSSELLSEAKKLNDSQAPK

SEQ ID NO: 486 - protein, 58 aa, synthetic construct
  REGION 1..58: note = Engineered IL-1R-I binding polypeptide
VDAKYAKEVITAYWEIFALPNLTRKQYTAFIRKLLDDPSQSSELLSEAKKLNDSQAPK

SEQ ID NO: 487 - protein, 58 aa, synthetic construct
  REGION 1..58: note = Engineered IL-1R-I binding polypeptide
VDAKYAKEVENAQMEIFALPNLTRKQYTAFIRKLLDDPSQSSELLSEAKKLNDSQAPK

SEQ ID NO: 488 - protein, 58 aa, synthetic construct
  REGION 1..58: note = Engineered IL-1R-I binding polypeptide
VDAKYAKEHVDAYWEIYALPNLTRKQYTAFIRKLLDDPSQSSELLSEAKKLNDSQAPK

SEQ ID NO: 489 - protein, 58 aa, synthetic construct
  REGION 1..58: note = Engineered IL-1R-I binding polypeptide
VDAKYAKEVTNAYFEIYDLPNLTRKQYTAFIRKLLDDPSQSSELLSEAKKLNDSQAPK

SEQ ID NO: 490 - protein, 58 aa, synthetic construct
  REGION 1..58: note = Engineered IL-1R-I binding polypeptide
VDAKYAKEAAEAQMEIFNLPNLTRKQYTAFIRKLLDDPSQSSELLSEAKKLNDSQAPK

SEQ ID NO: 491 - protein, 58 aa, synthetic construct
  REGION 1..58: note = Engineered IL-1R-I binding polypeptide
VDAKYAKEVHEAYFEIYDLPNLTRKQYTAFIRKLLDDPSQSSELLSEAKKLNDSQAPK

SEQ ID NO: 492 - protein, 58 aa, synthetic construct
  REGION 1..58: note = Engineered IL-1R-I binding polypeptide
VDAKYAKEADIAYWEIYALPNLTRKQYTAFIRKLLDDPSQSSELLSEAKKLNDSQAPK

SEQ ID NO: 493 - protein, 58 aa, synthetic construct
  REGION 1..58: note = Engineered IL-1R-I binding polypeptide
VDAKYAKEVEVAYMEIYRLPNLTRKQYTAFIRKLLDDPSQSSELLSEAKKLNDSQAPK

SEQ ID NO: 494 - protein, 58 aa, synthetic construct
  REGION 1..58: note = Engineered IL-1R-I binding polypeptide
VDAKYAKEIEAAQMEIFELPNLTRKQYTAFIRKLLDDPSQSSELLSEAKKLNDSQAPK

SEQ ID NO: 495 - protein, 58 aa, synthetic construct
  REGION 1..58: note = Engineered IL-1R-I binding polypeptide
VDAKYAKEVETAYFEIYNLPNLTRKQYTAFIRKLLDDPSQSSELLSEAKKLNDSQAPK

SEQ ID NO: 496 - protein, 58 aa, synthetic construct
  REGION 1..58: note = Engineered IL-1R-I binding polypeptide
VDAKYAKEAQQAYWEIFALPNLTRKQYTAFIRKLLDDPSQSSELLSEAKKLNDSQAPK

SEQ ID NO: 497 - protein, 58 aa, synthetic construct
  REGION 1..58: note = Engineered IL-1R-I binding polypeptide
VDAKYAKEIDKAYFEIFELPNLTRKQYTAFIRKLLDDPSQSSELLSEAKKLNDSQAPK

SEQ ID NO: 498 - protein, 58 aa, synthetic construct
  REGION 1..58: note = Engineered IL-1R-I binding polypeptide
VDAKYAKEVESAYFEIYSLPNLTRKQYTAFIRKLLDDPSQSSELLSEAKKLNDSQAPK

SEQ ID NO: 499 - protein, 58 aa, synthetic construct
  REGION 1..58: note = Engineered IL-1R-I binding polypeptide
VDAKYAKELYLAYFEIYALPNLTRKQYTAFIRKLLDDPSQSSELLSEAKKLNDSQAPK

SEQ ID NO: 500 - protein, 58 aa, synthetic construct
  REGION 1..58: note = Engineered IL-1R-I binding polypeptide
VDAKYAKEAVEAYFEIYELPNLTRKQYTAFIRKLLDDPSQSSELLSEAKKLNDSQAPK

SEQ ID NO: 501 - protein, 58 aa, synthetic construct
  REGION 1..58: note = Engineered IL-1R-I binding polypeptide
VDAKYAKEAVNAYWEIFALPNLTRRQYTAFIRKLLDDPSQSSELLSEAKKLNDSQAPK

SEQ ID NO: 502 - protein, 58 aa, synthetic construct
  REGION 1..58: note = Engineered IL-1R-I binding polypeptide
VDAKYAKELEYAYFEIYKLPNLTRKQYTAFIRKLLDDPSQSSELLSEAKKLNDSQAPK

SEQ ID NO: 503 - protein, 58 aa, synthetic construct
  REGION 1..58: note = Engineered IL-1R-I binding polypeptide
VDAKYAKEVQAAYWEIFALPNLTRKQYTAFIRKLLDDPSQSSELLSEAKKLNDSQAPK

SEQ ID NO: 504 - protein, 58 aa, synthetic construct
  REGION 1..58: note = Engineered IL-1R-I binding polypeptide
VDAKYAKEVEKAQMEIFDLPNLTRKQYTAFIRKLLDDPSQSSELLSEAKKLNDSQAPK

SEQ ID NO: 505 - protein, 58 aa, synthetic construct
  REGION 1..58: note = Engineered IL-1R-I binding polypeptide
VDAKYAKETYAAQMEIFSLPNLTRKQYTAFIRKLLDDPSQSSELLSEAKKLNDSQAPK

SEQ ID NO: 506 - protein, 58 aa, synthetic construct
  REGION 1..58: note = Engineered IL-1R-I binding polypeptide
VDAKYAKELEAAYYEIYELPNLTRKQYTAFIRKLLDDPSQSSELLSEAKKLNDSQAPK

SEQ ID NO: 507 - protein, 58 aa, synthetic construct
  REGION 1..58: note = Engineered IL-1R-I binding polypeptide
VDAKYAKEHVDAYFEIYALPNLTRKQYTAFIRKLLDDPSQSSELLSEAKKLNDSQAPK

SEQ ID NO: 508 - protein, 58 aa, synthetic construct
  REGION 1..58: note = Engineered IL-1R-I binding polypeptide
VDAKYAKETIHAYDEIYGLPNLTRKQYTAFIRKLLDDPSQSSELLSEAKKLNDSQAPK

SEQ ID NO: 509 - protein, 58 aa, synthetic construct
  REGION 1..58: note = Engineered IL-1R-I binding polypeptide
VDAKYAKEQEEAYWEIFQLPNLTRKQYTAFIRKLLDDPSQSSELLSEAKKLNDSQAPK

SEQ ID NO: 510 - protein, 58 aa, synthetic construct
  REGION 1..58: note = Engineered IL-1R-I binding polypeptide
VDAKYAKEVEEAYYEIYALPNLTRKQYTAFIRKLLDDPSQSSELLSEAKKLNDSQAPK

SEQ ID NO: 511 - protein, 58 aa, synthetic construct
  REGION 1..58: note = Engineered IL-1R-I binding polypeptide
VDAKYAKEIEEAQMEIFSLPNLTRKQYTAFIRKLFDDPSQSSELLSEAKKLNDSQAPK

SEQ ID NO: 512 - protein, 58 aa, synthetic construct
  REGION 1..58: note = Engineered IL-1R-I binding polypeptide
VDAKYAKEVEDAYFEIYDLPNLTRKQYTAFIRKLLDDPSQSSELLSEAKKLNDSQAPK

SEQ ID NO: 513 - protein, 58 aa, synthetic construct
  REGION 1..58: note = Engineered IL-1R-I binding polypeptide
VDAKYAKEIEEAQMEIYTLPNLTRKQYTAFIRKLLDDPSQSSELLSEAKKLNDSQAPK

SEQ ID NO: 514 - protein, 58 aa, synthetic construct
  REGION 1..58: note = Engineered IL-1R-I binding polypeptide
VDAKYAKEVERAYFEIYDLPNLTRKQYTAFIRKLLDDPSQSSELLSEAKKLNDSQAPK

SEQ ID NO: 515 - protein, 58 aa, synthetic construct
  REGION 1..58: note = Engineered IL-1R-I binding polypeptide
VDAKYAKEVVIAYHEIFKLPNLTRKQYTAFIRKLLDDPSQSSELLSEAKKLNDSQAPK

SEQ ID NO: 516 - protein, 58 aa, synthetic construct
  REGION 1..58: note = Engineered IL-1R-I binding polypeptide
VDAKYAKEAYDAQMEIFGLPNLTRKQYTAFIRKLLDDPSQSSELLSEAKKLNDSQAPK

SEQ ID NO: 517 - protein, 58 aa, synthetic construct
  REGION 1..58: note = Engineered IL-1R-I binding polypeptide
VDAKYAKEIIQAYYEIYHLPNLTRKQYTAFIRKLLDDPSQSSELLSEAKKLNDSQAPK

SEQ ID NO: 518 - protein, 58 aa, synthetic construct
  REGION 1..58: note = Engineered IL-1R-I binding polypeptide
VDAKYAKEVVSAYFEIYQLPNLTRKQYTAFIRKLLDDPSQSSELLSEAKKLNDSQAPK

SEQ ID NO: 519 - protein, 58 aa, synthetic construct
  REGION 1..58: note = Engineered IL-1R-I binding polypeptide
VDAKYAKEVEDAYFEIYKLPNLTRKQYTAFIRKLLDDPSQSSELLSEAKKLNDSQAPK

SEQ ID NO: 520 - protein, 58 aa, synthetic construct
  REGION 1..58: note = Engineered IL-1R-I binding polypeptide
VDAKYAKEVVEAYHEIFELPNLTRKQYTAFIRKLLDDPSQSSELLSEAKKLNDSQAPK

SEQ ID NO: 521 - protein, 58 aa, synthetic construct
  REGION 1..58: note = Engineered IL-1R-I binding polypeptide
VDAKYAKEAEVAYYEIYSLPNLTRKQYTAFIRKLLDDPSQSSELLSEAKKLNDSQAPK

SEQ ID NO: 522 - protein, 58 aa, synthetic construct
  REGION 1..58: note = Engineered IL-1R-I binding polypeptide
VDAKYAKEVEEAYMEIFGLPNLTRKQYTAFIRKLLDDPSQSSELLSEAKKLNDSQAPK

SEQ ID NO: 523 - protein, 58 aa, synthetic construct
  REGION 1..58: note = Engineered IL-1R-I binding polypeptide
VDAKYAKEAEWAYFEIFKLPNLTRKQYTAFIRKLLDDPSQSSELLSEAKKLNDSQAPK

SEQ ID NO: 524 - protein, 58 aa, synthetic construct
  REGION 1..58: note = Engineered IL-1R-I binding polypeptide
VDAKYAKEAEAAYWEIYALPNLTRKQYTAFIRKLLDDPSQSSELLSEAKKLNDSQAPK

SEQ ID NO: 525 - protein, 58 aa, synthetic construct
  REGION 1..58: note = Engineered IL-1R-I binding polypeptide
VDAKYAKEAYVAYYEIYNLPNLTRKQYTAFIRKLLDDPSQSSELLSEAKKLNDSQAPK

SEQ ID NO: 526 - protein, 58 aa, synthetic construct
  REGION 1..58: note = Engineered IL-1R-I binding polypeptide
VDAKYAKELEYAYHEIFALPNLTRKQYTAFIRKLLDDPSQSSELLSEAKKLNDSQAPK

SEQ ID NO: 527 - protein, 58 aa, synthetic construct
  REGION 1..58: note = Engineered IL-1R-I binding polypeptide
VDAKYAKESESAYWEIYALPNLTRKQYTAFIRKLLDDPSQSSELLSEAKKLNDSQAPK

SEQ ID NO: 528 - protein, 58 aa, synthetic construct
  REGION 1..58: note = Engineered IL-1R-I binding polypeptide
VDAKYAKEVEEAYQEIFNLPNLTRKQYTAFIRKLLDDPSQSSELLSEAKKLNDSQAPK

SEQ ID NO: 529 - protein, 58 aa, synthetic construct
  REGION 1..58: note = Engineered IL-1R-I binding polypeptide
VDAKYAKEIEEAYMEIFNLPNLTRKQYTAFIRKLLDDPSQSSELLSEAKKLNDSQAPK

SEQ ID NO: 530 - protein, 58 aa, synthetic construct
  REGION 1..58: note = Engineered IL-1R-I binding polypeptide
VDAKYAKEVVDAYSEIYLLPNLTRKQYTAFIRKLLDDPSQSSELLSEAKKLNDSQAPK

SEQ ID NO: 531 - protein, 58 aa, synthetic construct
  REGION 1..58: note = Engineered IL-1R-I binding polypeptide
VDAKYAKELEAAQMEIFALPNLTRRQYTAFIRKLLDDPSQSSELLSEAKKLNDSQAPK

SEQ ID NO: 532 - protein, 58 aa, synthetic construct
  REGION 1..58: note = Engineered IL-1R-I binding polypeptide
VDAKYAKEVEVAYMEIFELPNLTRKQYTAFIRKLLDDPSQSSELLSEAKKLNDSQAPK

SEQ ID NO: 533 - protein, 58 aa, synthetic construct
  REGION 1..58: note = Engineered IL-1R-I binding polypeptide
VDAKYAKEVHEAYFEIFALPNLTRKQYTAFIRKLLDDPSQSSELLSEAKKLNDSQAPK

SEQ ID NO: 534 - protein, 58 aa, synthetic construct
  REGION 1..58: note = Engineered IL-1R-I binding polypeptide
VDAKYAKEVENAYYEIYELPNLTRKQYTAFIRKLLDDPSQSSELLSEAKKLNDSQAPK

SEQ ID NO: 535 - protein, 58 aa, synthetic construct
  REGION 1..58: note = Engineered IL-1R-I binding polypeptide
VDAKYAKEVEHAYYEIYRLPNLTRKQYTAFIRKLLDDPSQSSELLSEAKKLNDSQAPK

SEQ ID NO: 536 - protein, 58 aa, synthetic construct
  REGION 1..58: note = Engineered IL-1R-I binding polypeptide
VDAKYAKEAEDAYMEIFHLPNLTRKQYTAFIRKLLDDPSQSSELLSEAKKLNDSQAPK

SEQ ID NO: 537 - protein, 58 aa, synthetic construct
  REGION 1..58: note = Engineered IL-1R-I binding polypeptide
VDAKYAKETYAAQMEIYRLPNLTRKQYTAFIRKLLDDPSQSSELLSEAKKLNDSQAPK

SEQ ID NO: 538 - protein, 58 aa, synthetic construct
  REGION 1..58: note = Engineered IL-1R-I binding polypeptide
VDAKYAKEAEYAYFEIFALPNLTRKQYTAFIRKLLDDPSQSSELLSEAKKLNDSQAPK

SEQ ID NO: 539 - protein, 58 aa, synthetic construct
  REGION 1..58: note = Engineered IL-1R-I binding polypeptide
VDAKYAKEVVEAYYEIYELPNLTRKQYTAFIRKLLDDPSQSSELLSEAKKLNDSQAPK

SEQ ID NO: 540 - protein, 58 aa, synthetic construct
  REGION 1..58: note = Engineered IL-1R-I binding polypeptide
VDAKYAKEVVHAYFEIFSLPNLTRKQYTAFIRKLLDDPSQSSELLSEAKKLNDSQAPK

SEQ ID NO: 541 - protein, 58 aa, synthetic construct
  REGION 1..58: note = Engineered IL-1R-I binding polypeptide
VDAKYAKEIENAQMEIFYLPNLTRRQYTAFIRKLLDDPSQSSELLSEAKKLNDSQAPK

SEQ ID NO: 542 - protein, 58 aa, synthetic construct
  REGION 1..58: note = Engineered IL-1R-I binding polypeptide
VDAKYAKEVEAAYFEIYTLPNLTRKQYTAFIRKLLDDPSQSSELLSEAKKLNDSQAPK

SEQ ID NO: 543 - protein, 58 aa, synthetic construct
  REGION 1..58: note = Engineered IL-1R-I binding polypeptide
VDAKYAKETLHAYDEIYQLPNLTRKQYTAFIRKLLDDPSQSSELLSEAKKLNDSQAPK

SEQ ID NO: 544 - protein, 58 aa, synthetic construct
  REGION 1..58: note = Engineered IL-1R-I binding polypeptide
VDAKYAKEVEEAYMEIFRLPNLTRKQYTAFIRKLLDDPSQSSELLSEAKKLNDSQAPK

SEQ ID NO: 545 - protein, 58 aa, synthetic construct
  REGION 1..58: note = Engineered IL-1R-I binding polypeptide
VDAKYAKEVEEAQMEIFNLPNLTRKQYTAFIRKLLDDPSQSSELLSEAKKLNDSQAPK

SEQ ID NO: 546 - protein, 58 aa, synthetic construct
  REGION 1..58: note = Engineered IL-1R-I binding polypeptide
VDAKYAKETVDAYYEIYALPNLTRKQYTAFIRKLLDDPSQSSELLSEAKKLNDSQAPK

SEQ ID NO: 547 - protein, 58 aa, synthetic construct
  REGION 1..58: note = Engineered IL-1R-I binding polypeptide
VDAKYAKEAEEAYFEIYGLPNLTRKQYTAFIRKLLDDPSQSSELLSEAKKLNDSQAPK

SEQ ID NO: 548 - protein, 58 aa, synthetic construct
  REGION 1..58: note = Engineered IL-1R-I binding polypeptide
VDAKYAKEIEIAQMEIFTLPNLTRKQYTAFIRKLLDDPSQSSELLSEAKKLNDSQAPK

SEQ ID NO: 549 - protein, 58 aa, synthetic construct
  REGION 1..58: note = Engineered IL-1R-I binding polypeptide
VDAKYAKEVEIAYFEIFALPNLTRKQYTAFIRKLLDDPSQSSELLSEAKKLNDSQAPK

SEQ ID NO: 550 - protein, 58 aa, synthetic construct
  REGION 1..58: note = Engineered IL-1R-I binding polypeptide
VDAKYAKEVEQAQMEIFRLPNLTRKQYTAFIRKLLDDPSQSSELLSEAKKLNDSQAPK

SEQ ID NO: 551 - protein, 58 aa, synthetic construct
  REGION 1..58: note = Engineered IL-1R-I binding polypeptide
VDAKYAKEVQDAYWEIYQLPNLTRKQYTAFIRKLLDDPSQSSELLSEAKKLNDSQAPK

SEQ ID NO: 552 - protein, 58 aa, synthetic construct
  REGION 1..58: note = Engineered IL-1R-I binding polypeptide
VDAKYAKETEEAYWEIYALPNLTRKQYTAFIRKLLDDPSQSSELLSEAKKLNDSQAPK

SEQ ID NO: 553 - protein, 58 aa, synthetic construct
  REGION 1..58: note = Engineered IL-1R-I binding polypeptide
VDAKYAKEVEAAYFEIYALPNLTRKQYTAFIRKLLDDPSQSSELLSEAKKLNDSQAPK

SEQ ID NO: 554 - protein, 58 aa, synthetic construct
  REGION 1..58: note = Engineered IL-1R-I binding polypeptide
VDAKYAKEIEDAQMEIFGLPNLTRKQYTAFIRKLLDDPSQSSELLSEAKKLNDSQAPK

SEQ ID NO: 555 - protein, 58 aa, synthetic construct
  REGION 1..58: note = Engineered IL-1R-I binding polypeptide
VDAKYAKEVEVAYFEIFHLPNLTRKQYTAFIRKLLDDPSQSSELLSEAKKLNDSQAPK

SEQ ID NO: 556 - protein, 58 aa, synthetic construct
  REGION 1..58: note = Engineered IL-1R-I binding polypeptide
VDAKYAKEIETAYMEIYRLPNLTRKQYTAFIRKLLDDPSQSSELLSEAKKLNDSQAPK

SEQ ID NO: 557 - protein, 58 aa, synthetic construct
  REGION 1..58: note = Engineered IL-1R-I binding polypeptide
VDAKYAKEADAAYWEIYALPNLTRKQYTAFIRKLLDDPSQSSELLSEAKKLNDSQAPK

SEQ ID NO: 558 - protein, 58 aa, synthetic construct
  REGION 1..58: note = Engineered IL-1R-I binding polypeptide
VDAKYAKEVEQAYYEIYHLPNLTRKQYTAFIRKLLDDPSQSSELLSEAKKLNDSQAPK

SEQ ID NO: 559 - protein, 58 aa, synthetic construct
  REGION 1..58: note = Engineered IL-1R-I binding polypeptide
VDAKYAKEIEKAYYEIYELPNLTRKQYTAFIRKLLDDPSQSSELLSEAKKLNDSQAPK

SEQ ID NO: 560 - protein, 58 aa, synthetic construct
  REGION 1..58: note = Engineered IL-1R-I binding polypeptide
VDAKYAKEVVAAYYEIYGLPNLTRKQYTAFIRKLLDDPSQSSELLSEAKKLNDSQAPK

SEQ ID NO: 561 - protein, 58 aa, synthetic construct
  REGION 1..58: note = Engineered IL-1R-I binding polypeptide
VDAKYAKEVVSAYYEIYNLPNLTRKQYTAFIRKLLDDPSQSSELLSEAKKLNDSQAPK

SEQ ID NO: 562 - protein, 58 aa, synthetic construct
  REGION 1..58: note = Engineered IL-1R-I binding polypeptide
VDAKYAKETERAQMEIFYLPNLTRKQYTAFIRKLLDDPSQSSELLSEAKKLNDSQAPK

SEQ ID NO: 563 - protein, 58 aa, synthetic construct
  REGION 1..58: note = Engineered IL-1R-I binding polypeptide
VDAKYAKEVESAYFEIFKLPNLTRKQYTAFIRKLLDDPSQSSELLSEAKKLNDSQAPK

SEQ ID NO: 564 - protein, 58 aa, synthetic construct
  REGION 1..58: note = Engineered IL-1R-I binding polypeptide
VDAKYAKEVEKAYMEIYALPNLTRKQYTAFIRKLLDDPSQSSELLSEAKKLNDSQAPK

SEQ ID NO: 565 - protein, 58 aa, synthetic construct
  REGION 1..58: note = Engineered IL-1R-I binding polypeptide
VDAKYAKETEDAYMEIYELPNLTRKQYTAFIRKLLDDPSQSSELLSEAKKLNDSQAPK

SEQ ID NO: 566 - protein, 58 aa, synthetic construct
  REGION 1..58: note = Engineered IL-1R-I binding polypeptide
VDAKYAKEAEEAYFEIYNLPNLTRKQYTAFIRKLLDDPSQSSELLSEAKKLNDSQAPK

SEQ ID NO: 567 - protein, 58 aa, synthetic construct
  REGION 1..58: note = Engineered IL-1R-I binding polypeptide
VDAKYAKETLEAYDEIYQLPNLTRKQYTAFIRKLLDDPSQSSELLSEAKKLNDSQAPK

SEQ ID NO: 568 - protein, 58 aa, synthetic construct
  REGION 1..58: note = Engineered IL-1R-I binding polypeptide
VDAKYAKELEVAYMEIFHLPNLTRKQYTAFIRKLLDDPSQSSELLSEAKKLNDSQAPK

SEQ ID NO: 569 - protein, 58 aa, synthetic construct
  REGION 1..58: note = Engineered IL-1R-I binding polypeptide
VDAKYAKEVEIAQMEIFGLPNLTRKQYTAFIRKLLDDPSQSSELLSEAKKLNDSQAPK

SEQ ID NO: 570 - protein, 58 aa, synthetic construct
  REGION 1..58: note = Engineered IL-1R-I binding polypeptide
VDAKYAKEVVEAYQEIFHLPNLTRKQYTAFIRKLLDDPSQSSELLSEAKKLNDSQAPK

SEQ ID NO: 571 - protein, 58 aa, synthetic construct
  REGION 1..58: note = Engineered IL-1R-I binding polypeptide
VDAKYAKEAEEAYYEIYGLPNLTRKQYTAFIRKLLDDPSQSSELLSEAKKLNDSQAPK

SEQ ID NO: 572 - protein, 58 aa, synthetic construct
  REGION 1..58: note = Engineered IL-1R-I binding polypeptide
VDAKYAKEVEAAYMEIFHLPNLTRKQYTAFIRKLLDDPSQSSELLSEAKKLNDSQAPK

SEQ ID NO: 573 - protein, 58 aa, synthetic construct
  REGION 1..58: note = Engineered IL-1R-I binding polypeptide
VDAKYAKEHEDAYMEIYALPNLTRKQYTAFIRKLLDDPSQSSELLSEAKKLNDSQAPK

SEQ ID NO: 574 - protein, 58 aa, synthetic construct
  REGION 1..58: note = Engineered IL-1R-I binding polypeptide
VDAKYAKELEKAYFEIYNLPNLTRKQYTAFIRKLLDDPSQSSELLSEAKKLNDSQAPK

SEQ ID NO: 575 - protein, 58 aa, synthetic construct
  REGION 1..58: note = Engineered IL-1R-I binding polypeptide
VDAKYAKEVEIAQMEIFALPNLTRRQYTAFIRKLLDDPSQSSELLSEAKKLNDSQAPK

SEQ ID NO: 576 - protein, 58 aa, synthetic construct
  REGION 1..58: note = Engineered IL-1R-I binding polypeptide
VDAKYAKEVELAYMEIFNLPNLTRRQYTAFIRKLLDDPSQSSELLSEAKKLNDSQAPK

SEQ ID NO: 577 - protein, 58 aa, synthetic construct
  REGION 1..58: note = Engineered IL-1R-I binding polypeptide
VDAKYAKEVFEAQMEIYRLPNLTRKQYTAFIRKLLDDPSQSSELLSEAKKLNDSQAPK

SEQ ID NO: 578 - protein, 58 aa, synthetic construct
  REGION 1..58: note = Engineered IL-1R-I binding polypeptide
VDAKYAKEVEDAYMEIYELPNLTRKQYTAFIRKLLDDPSQSSELLSEAKKLNDSQAPK

SEQ ID NO: 579 - protein, 58 aa, synthetic construct
  REGION 1..58: note = Engineered IL-1R-I binding polypeptide
VDAKYAKETESAYFEIFKLPNLTRKQYTAFIRKLLDDPSQSSELLSEAKKLNDSQAPK

SEQ ID NO: 580 - protein, 58 aa, synthetic construct
  REGION 1..58: note = Engineered IL-1R-I binding polypeptide
VDAKYAKELEEAYFEIYELPNLTRKQYTAFIRKLLDDPSQSSELLSEAKKLNDSQAPK

SEQ ID NO: 581 - protein, 58 aa, synthetic construct
  REGION 1..58: note = Engineered IL-1R-I binding polypeptide
VDAKYAKEVVTAYQEIYELPNLTRKQYTAFIRKLLDDPSQSSELLSEAKKLNDSQAPK

SEQ ID NO: 582 - protein, 58 aa, synthetic construct
  REGION 1..58: note = Engineered IL-1R-I binding polypeptide
VDAKYAKEVEAAYFEIYELPNLTRKQYTAFIRKLLDDPSQSSELLSEAKKLNDSQAPK

SEQ ID NO: 583 - protein, 58 aa, synthetic construct
  REGION 1..58: note = Engineered IL-1R-I binding polypeptide
VDAKYAKEVEWAYMEIYHLPNLTRKQYTAFIRKLLDDPSQSSELLSEAKKLNDSQAPK

SEQ ID NO: 584 - protein, 58 aa, synthetic construct
  REGION 1..58: note = Engineered IL-1R-I binding polypeptide
VDAKYAKETEYAYWEIYALPNLTRKQYTAFIRKLLDDPSQSSELLSEAKKLNDSQAPK

SEQ ID NO: 585 - protein, 58 aa, synthetic construct
  REGION 1..58: note = Engineered IL-1R-I binding polypeptide
VDAKYAKEVETAYMEIYNLPNLTRKQYTAFIRKLLDDPSQSSELLSEAKKLNDSQAPK

SEQ ID NO: 586 - protein, 58 aa, synthetic construct
  REGION 1..58: note = Engineered IL-1R-I binding polypeptide
VDAKYAKEVEFAYMEIYNLPNLTRKQYTAFIRKLLDDPSQSSELLSEAKKLNDSQAPK

SEQ ID NO: 587 - protein, 58 aa, synthetic construct
  REGION 1..58: note = Engineered IL-1R-I binding polypeptide
VDAKYAKEVEAAYFEIFALPNLTRKQYTAFIRKLLDDPSQSSELLSEAKKLNDSQAPK

SEQ ID NO: 588 - protein, 58 aa, synthetic construct
  REGION 1..58: note = Engineered IL-1R-I binding polypeptide
VDAKYAKEVERAYMEIFHLPNLTRKQYTAFIRKLLDDPSQSSELLSEAKKLNDSQAPK

SEQ ID NO: 589 - protein, 58 aa, synthetic construct
  REGION 1..58: note = Engineered IL-1R-I binding polypeptide
VDAKYAKETVIAYFEIFKLPNLTRKQYTAFIRKLLDDPSQSSELLSEAKKLNDSQAPK

SEQ ID NO: 590 - protein, 58 aa, synthetic construct
  REGION 1..58: note = Engineered IL-1R-I binding polypeptide
VDAKYAKETEDAYFEIYHLPNLTRKQYTAFIRKLLDDPSQSSELLSEAKKLNDSQAPK

SEQ ID NO: 591 - protein, 58 aa, synthetic construct
  REGION 1..58: note = Engineered IL-1R-I binding polypeptide
VDAKYAKEADSAYWEIYALPNLTRKQYTAFIRKLLDDPSQSSELLSEAKKLNDSQAPK

SEQ ID NO: 592 - protein, 58 aa, synthetic construct
  REGION 1..58: note = Engineered IL-1R-I binding polypeptide
VDAKYAKEVELAQMEIFALPNLTRKQYTAFIRKLLDDPSQSSELLSEAKKLNDSQAPK

SEQ ID NO: 593 - protein, 58 aa, synthetic construct
  REGION 1..58: note = Engineered IL-1R-I binding polypeptide
VDAKYAKEVEQAYFEIYDLPNLTRKQYTAFIRKLLDDPSQSSELLSEAKKLNDSQAPK

SEQ ID NO: 594 - protein, 58 aa, synthetic construct
  REGION 1..58: note = Engineered IL-1R-I binding polypeptide
VDAKYAKEAVDAYYEIYHLPNLTRKQYTAFIRKLLDDPSQSSELLSEAKKLNDSQAPK

SEQ ID NO: 595 - protein, 58 aa, synthetic construct
  REGION 1..58: note = Engineered IL-1R-I binding polypeptide
VDAKYAKELQEAYMEIYHLPNLTRKQYTAFIRKLLDDPSQSSELLSEAKKLNDSQAPK

SEQ ID NO: 596 - protein, 58 aa, synthetic construct
  REGION 1..58: note = Engineered IL-1R-I binding polypeptide
VDAKYAKEHVDAYMEIYALPNLTRKQYTAFIRKLLDDPSQSSELLSEAKKLNDSQAPK

SEQ ID NO: 597 - protein, 58 aa, synthetic construct
  REGION 1..58: note = Engineered IL-1R-I binding polypeptide
VDAKYAKEVEHAYEEIYALPNLTRRQYTAFIRKLLDDPSQSSELLSEAKKLNDSQAPK

SEQ ID NO: 598 - protein, 58 aa, synthetic construct
  REGION 1..58: note = Engineered IL-1R-I binding polypeptide
VDAKYAKEVVVAYHEIFALPNLTRKQYTAFIRKLLDDPSQSSELLSEAKKLNDSQAPK

SEQ ID NO: 599 - protein, 58 aa, synthetic construct
  REGION 1..58: note = Engineered IL-1R-I binding polypeptide
VDAKYAKEHWKAYLEIYALPNLTRKQYTAFIRKLLDDPSQSSELLSEAKKLNDSQAPK

SEQ ID NO: 600 - protein, 58 aa, synthetic construct
  REGION 1..58: note = Engineered IL-1R-I binding polypeptide
VDAKYAKEVYDAQMEIFALPNLTRKQYTAFIRKLLDDPSQSSELLSEAKKLNDSQAPK

SEQ ID NO: 601 - protein, 58 aa, synthetic construct
  REGION 1..58: note = Engineered IL-1R-I binding polypeptide
VDAKYAKEVEAAYMEIYGLPNLTRKQYTAFIRKLLDDPSQSSELLSEAKKLNDSQAPK

SEQ ID NO: 602 - protein, 58 aa, synthetic construct
  REGION 1..58: note = Engineered IL-1R-I binding polypeptide
VDAKYAKEHLTAYYEIYALPNLTRKQYTAFIRKLLDDPSQSSELLSEAKKLNDSQAPK

SEQ ID NO: 603 - protein, 58 aa, synthetic construct
  REGION 1..58: note = Engineered IL-1R-I binding polypeptide
VDAKYAKEVKDAYFEIFELPNLTRKQYTAFIRKLLDDPSQSSELLSEAKKLNDSQAPK

SEQ ID NO: 604 - protein, 58 aa, synthetic construct
  REGION 1..58: note = Engineered IL-1R-I binding polypeptide
VDAKYAKETEYAQMEIFALPNLTRKQYTAFIRKLLDDPSQSSELLSEAKKLNDSQAPK

SEQ ID NO: 605 - protein, 58 aa, synthetic construct
  REGION 1..58: note = Engineered IL-1R-I binding polypeptide
VDAKYAKEIEDAYMEIYHLPNLTRKQYTAFIRKLLDDPSQSSELLSEAKKLNDSQAPK

SEQ ID NO: 606 - protein, 58 aa, synthetic construct
  REGION 1..58: note = Engineered IL-1R-I binding polypeptide
VDAKYAKELEEAYYEIYDLPNLTRKQYTAFIRKLLDDPSQSSELLSEAKKLNDSQAPK

SEQ ID NO: 607 - protein, 58 aa, synthetic construct
  REGION 1..58: note = Engineered IL-1R-I binding polypeptide
VDAKYAKETENAYMEIYHLPNLTRKQYTAFIRKLLDDPSQSSELLSEAKKLNDSQAPK

SEQ ID NO: 608 - protein, 58 aa, synthetic construct
  REGION 1..58: note = Engineered IL-1R-I binding polypeptide
VDAKYAKEIESAYFEIYELPNLTRKQYTAFIRKLLDDPSQSSELLSEAKKLNDSQAPK

SEQ ID NO: 609 - protein, 58 aa, synthetic construct
  REGION 1..58: note = Engineered IL-1R-I binding polypeptide
VDAKYAKEVYIAQMEIFRLPNLTRKQYTAFIRKLLDDPSQSSELLSEAKKLNDSQAPK

SEQ ID NO: 610 - protein, 58 aa, synthetic construct
  REGION 1..58: note = Engineered IL-1R-I binding polypeptide
VDAKYAKEVEEAYFEIFALPNLTRRQYTAFIRKLLDDPSQSSELLSEAKKLNDSQAPK

SEQ ID NO: 611 - protein, 58 aa, synthetic construct
  REGION 1..58: note = Engineered IL-1R-I binding polypeptide
VDAKYAKEAINAHHEIFLLPNLTRKQYTAFIRKLFDDPSQSSELLSEAKKLNDSQAPK

SEQ ID NO: 612 - protein, 58 aa, synthetic construct
  REGION 1..58: note = Engineered IL-1R-I binding polypeptide
VDAKYAKEIEDAQMEIYRLPNLTRKQYTAFIRKLLDDPSQSSELLSEAKKLNDSQAPK

SEQ ID NO: 613 - protein, 58 aa, synthetic construct
  REGION 1..58: note = Engineered IL-1R-I binding polypeptide
VDAKYAKEAYEAQMEIFSLPNLTRKQYTAFIRKLLDDPSQSSELLSEAKKLNDSQAPK

SEQ ID NO: 614 - protein, 58 aa, synthetic construct
  REGION 1..58: note = Engineered IL-1R-I binding polypeptide
VDAKYAKEAEDAYMEIYHLPNLTRKQYTAFIRKLLDDPSQSSELLSEAKKLNDSQAPK

SEQ ID NO: 615 - protein, 58 aa, synthetic construct
  REGION 1..58: note = Engineered IL-1R-I binding polypeptide
VDAKYAKEVEQAYFEIYSLPNLTRKQYTAFIRKLLDDPSQSSELLSEAKKLNDSQAPK

SEQ ID NO: 616 - protein, 58 aa, synthetic construct
  REGION 1..58: note = Engineered IL-1R-I binding polypeptide
VDAKYAKEIEEAQMEIYFLPNLTRKQYTAFIRKLLDDPSQSSELLSEAKKLNDSQAPK

SEQ ID NO: 617 - protein, 58 aa, synthetic construct
  REGION 1..58: note = Engineered IL-1R-I binding polypeptide
VDAKYAKETVSAYFEIYNLPNLTRKQYTAFIRKLLDDPSQSSELLSEAKKLNDSQAPK

SEQ ID NO: 618 - protein, 58 aa, synthetic construct
  REGION 1..58: note = Engineered IL-1R-I binding polypeptide
VDAKYAKETEEAYFEIYNLPNLTRKQYTAFIRKLLDDPSQSSELLSEAKKLNDSQAPK

SEQ ID NO: 619 - protein, 58 aa, synthetic construct
  REGION 1..58: note = Engineered IL-1R-I binding polypeptide
VDAKYAKEADRAYWEIYALPNLTRKQYTAFIRKLLDDPSQSSELLSEAKKLNDSQAPK

SEQ ID NO: 620 - protein, 58 aa, synthetic construct
  REGION 1..58: note = Engineered IL-1R-I binding polypeptide
VDAKYAKETYKAQQEIYKLPNLTRRQYTAFIRKLLDDPSQSSELLSEAKKLNDSQAPK

SEQ ID NO: 621 - protein, 58 aa, synthetic construct
  REGION 1..58: note = Engineered IL-1R-I binding polypeptide
VDAKYAKEVEVAYWEIFNLPNLTRKQYTAFIRKLLDDPSQSSELLSEAKKLNDSQAPK

SEQ ID NO: 622 - protein, 58 aa, synthetic construct
  REGION 1..58: note = Engineered IL-1R-I binding polypeptide
VDAKYAKELERAYYEIYDLPNLTRKQYTAFIRKLLDDPSQSSELLSEAKKLNDSQAPK

SEQ ID NO: 623 - protein, 58 aa, synthetic construct
  REGION 1..58: note = Engineered IL-1R-I binding polypeptide
VDAKYAKEAIDAYWEIYHLPNLTRKQYTAFIRKLLDDPSQSSELLSEAKKLNDSQAPK

SEQ ID NO: 624 - protein, 58 aa, synthetic construct
  REGION 1..58: note = Engineered IL-1R-I binding polypeptide
VDAKYAKEVESAYMEIFHLPNLTRKQYTAFIRKLLDDPSQSSELLSEAKKLNDSQAPK

SEQ ID NO: 625 - protein, 58 aa, synthetic construct
  REGION 1..58: note = Engineered IL-1R-I binding polypeptide
VDAKYAKEAENAYFEIYELPNLTRKQYTAFIRKLLDDPSQSSELLSEAKKLNDSQAPK

SEQ ID NO: 626 - protein, 58 aa, synthetic construct
  REGION 1..58: note = Engineered IL-1R-I binding polypeptide
VDAKYAKEADAAYWEIYSLPNLTRKQYTAFIRKLLDDPSQSSELLSEAKKLNDSQAPK

SEQ ID NO: 627 - protein, 58 aa, synthetic construct
  REGION 1..58: note = Engineered IL-1R-I binding polypeptide
VDAKYAKEATEAYMEIFALPNLTRKQYTAFIRKLLDDPSQSSELLSEAKKLNDSQAPK

SEQ ID NO: 628 - protein, 58 aa, synthetic construct
  REGION 1..58: note = Engineered IL-1R-I binding polypeptide
VDAKYAKEVHDAYFEIYDLPNLTRKQYTAFIRKLLDDPSQSSELLSEAKKLNDSQAPK

SEQ ID NO: 629 - protein, 58 aa, synthetic construct
  REGION 1..58: note = Engineered IL-1R-I binding polypeptide
VDAKYAKELEFAYQEIFSLPNLTRKQYTAFIRKLLDDPSQSSELLSEAKKLNDSQAPK

SEQ ID NO: 630 - protein, 58 aa, synthetic construct
  REGION 1..58: note = Engineered IL-1R-I binding polypeptide
VDAKYAKEHVAAYFEIYRLPNLTRKQYTAFIRKLLDDPSQSSELLSEAKKLNDSQAPK

SEQ ID NO: 631 - protein, 58 aa, synthetic construct
  REGION 1..58: note = Engineered IL-1R-I binding polypeptide
VDAKYAKEVEVAYMEIFALPNLTRKQYTAFIRKLLDDPSQSSELLSEAKKLNDSQAPK

SEQ ID NO: 632 - protein, 58 aa, synthetic construct
  REGION 1..58: note = Engineered IL-1R-I binding polypeptide
VDAKYAKEVEQAYSEIFNLPNLTRKQYTAFIRKLLDDPSQSSELLSEAKKLNDSQAPK

SEQ ID NO: 633 - protein, 58 aa, synthetic construct
  REGION 1..58: note = Engineered IL-1R-I binding polypeptide
VDAKYAKEAEVAYMEIFALPNLTRKQYTAFIRKLLDDPSQSSELLSEAKKLNDSQAPK

SEQ ID NO: 634 - protein, 58 aa, synthetic construct
  REGION 1..58: note = Engineered IL-1R-I binding polypeptide
VDAKYAKEVEIAYYEIFALPNLTRKQYTAFIRKLLDDPSQSSELLSEAKKLNDSQAPK

SEQ ID NO: 635 - protein, 58 aa, synthetic construct
  REGION 1..58: note = Engineered IL-1R-I binding polypeptide
VDAKYAKEVENAYYEIYQLPNLTRKQYTAFIRKLLDDPSQSSELLSEAKKLNDSQAPK

SEQ ID NO: 636 - protein, 58 aa, synthetic construct
  REGION 1..58: note = Engineered IL-1R-I binding polypeptide
VDAKYAKEAYEAQMEIFALPNLTRKQYTAFIRKLLDDPSQSSELLSEAKKLNDSQAPK

SEQ ID NO: 637 - protein, 58 aa, synthetic construct
  REGION 1..58: note = Engineered IL-1R-I binding polypeptide
VDAKYAKEADQAYWEIYALPNLTRKQYTAFIRKLLDDPSQSSELLSEAKKLNDSQAPK

SEQ ID NO: 638 - protein, 58 aa, synthetic construct
  REGION 1..58: note = Engineered IL-1R-I binding polypeptide
VDAKYAKELHHAYDEIFQLPNLTRKQYTAFIRKLLDDPSQSSELLSEAKKLNDSQAPK

SEQ ID NO: 639 - protein, 58 aa, synthetic construct
  REGION 1..58: note = Engineered IL-1R-I binding polypeptide
VDAKYAKEVEEAYQEIFHLPNLTRRQYTAFIRKLLDDPSQSSELLSEAKKLNDSQAPK

SEQ ID NO: 640 - protein, 58 aa, synthetic construct
  REGION 1..58: note = Engineered IL-1R-I binding polypeptide
VDAKYAKEVEAAYYEIFSLPNLTRKQYTAFIRKLLDDPSQSSELLSEAKKLNDSQAPK

SEQ ID NO: 641 - protein, 58 aa, synthetic construct
  REGION 1..58: note = Engineered IL-1R-I binding polypeptide
VDAKYAKEVEIAQYEIFALPNLTRKQYTAFIRKLLDDPSQSSELLSEAKKLNDSQAPK

SEQ ID NO: 642 - protein, 58 aa, synthetic construct
  REGION 1..58: note = Engineered IL-1R-I binding polypeptide
VDAKYAKEVEEAYFEIYDLPNLTRKQYTAFIRKLLDDPSQSSELLSEAKKLNDSQAPK

SEQ ID NO: 643 - protein, 58 aa, synthetic construct
  REGION 1..58: note = Engineered IL-1R-I binding polypeptide
VDAKYAKETESAYWEIYKLPNLTRKQYTAFIRKLLDDPSQSSELLSEAKKLNDSQAPK

SEQ ID NO: 644 - protein, 58 aa, synthetic construct
  REGION 1..58: note = Engineered IL-1R-I binding polypeptide
VDAKYAKEVERAYYEIFELPNLTRKQYTAFIRKLLDDPSQSSELLSEAKKLNDSQAPK

SEQ ID NO: 645 - protein, 58 aa, synthetic construct
  REGION 1..58: note = Engineered IL-1R-I binding polypeptide
VDAKYAKEAEEAYMEIFALPNLTRKQYTAFIRKLLDDPSQSSELLSEAKKLNDSQAPK

SEQ ID NO: 646 - protein, 58 aa, synthetic construct
  REGION 1..58: note = Engineered IL-1R-I binding polypeptide
VDAKYAKEVERAQMEIFELPNLTRKQYTAFIRKLLDDPSQSSELLSEAKKLNDSQAPK

SEQ ID NO: 647 - protein, 58 aa, synthetic construct
  REGION 1..58: note = Engineered IL-1R-I binding polypeptide
VDAKYAKETEQAYMEIYALPNLTRKQYTAFIRKLLDDPSQSSELLSEAKKLNDSQAPK

SEQ ID NO: 648 - protein, 58 aa, synthetic construct
  REGION 1..58: note = Engineered IL-1R-I binding polypeptide
VDAKYAKEVERAYFEIFALPNLTRKQYTAFIRKLLDDPSQSSELLSEAKKLNDSQAPK

SEQ ID NO: 649 - protein, 58 aa, synthetic construct
  REGION 1..58: note = Engineered IL-1R-I binding polypeptide
VDAKYAKEVEQAYFEIFELPNLTRKQYTAFIRKLLDDPSQSSELLSEAKKLNDSQAPK

SEQ ID NO: 650 - protein, 58 aa, synthetic construct
  REGION 1..58: note = Engineered IL-1R-I binding polypeptide
VDAKYAKEVQKAYFEIYDLPNLTRKQYTAFIRKLLDDPSQSSELLSEAKKLNDSQAPK

SEQ ID NO: 651 - protein, 58 aa, synthetic construct
  REGION 1..58: note = Engineered IL-1R-I binding polypeptide
VDAKYAKEVEAAYMEIYELPNLTRKQYTAFIRKLLDDPSQSSELLSEAKKLNDSQAPK

SEQ ID NO: 652 - protein, 58 aa, synthetic construct
  REGION 1..58: note = Engineered IL-1R-I binding polypeptide
VDAKYAKEVEEAYFEIYALPNLTRRQYTAFIRKLLDDPSQSSELLSEAKKLNDSQAPK

SEQ ID NO: 653 - protein, 58 aa, synthetic construct
  REGION 1..58: note = Engineered IL-1R-I binding polypeptide
VDAKYAKELEDAYMEIYSLPNLTRKQYTAFIRKLLDDPSQSSELLSEAKKLNDSQAPK

SEQ ID NO: 654 - protein, 58 aa, synthetic construct
  REGION 1..58: note = Engineered IL-1R-I binding polypeptide
VDAKYAKEVVDAYDEIFHLPNLTRKQYTAFIRKLLDDPSQSSELLSEAKKLNDSQAPK

SEQ ID NO: 655 - protein, 58 aa, synthetic construct
  REGION 1..58: note = Engineered IL-1R-I binding polypeptide
VDAKYAKEVVDAYDEIFRLPNLTRKQYTAFIRKLLDDPSQSSELLSEAKKLNDSQAPK

SEQ ID NO: 656 - protein, 58 aa, synthetic construct
  REGION 1..58: note = Engineered IL-1R-I binding polypeptide
VDAKYAKEVEDAYEEIYALPNLTRKQYTAFIRKLLDDPSQSSELLSEAKKLNDSQAPK

SEQ ID NO: 657 - protein, 58 aa, synthetic construct
  REGION 1..58: note = Engineered IL-1R-I binding polypeptide
VDAKYAKEAEEAYWEIYELPNLTRKQYTAFIRKLLDDPSQSSELLSEAKKLNDSQAPK

SEQ ID NO: 658 - protein, 58 aa, synthetic construct
  REGION 1..58: note = Engineered IL-1R-I binding polypeptide
VDAKYAKEVEVAQMEIFDLPNLTRKQYTAFIRKLLDDPSQSSELLSEAKKLNDSQAPK

SEQ ID NO: 659 - protein, 58 aa, synthetic construct
  REGION 1..58: note = Engineered IL-1R-I binding polypeptide
VDAKYAKEVEVAQMEIFGLPNLTRKQYTAFIRKLLDDPSQSSELLSEAKKLNDSQAPK

SEQ ID NO: 660 - protein, 58 aa, synthetic construct
  REGION 1..58: note = Engineered IL-1R-I binding polypeptide
VDAKYAKELEAAQMEIFELPNLTRKQYTAFIRKLLDDPSQSSELLSEAKKLNDSQAPK

SEQ ID NO: 661 - protein, 58 aa, synthetic construct
  REGION 1..58: note = Engineered IL-1R-I binding polypeptide
VDAKYAKEVEEAYFEIYNLPNLTRKQYTAFIRKLLDDPSQSSELLSEAKKLNDSQAPK

SEQ ID NO: 662 - protein, 58 aa, synthetic construct
  REGION 1..58: note = Engineered IL-1R-I binding polypeptide
VDAKYAKEVEQAYMEIYELPNLTRKQYTAFIRKLLDDPSQSSELLSEAKKLNDSQAPK

SEQ ID NO: 663 - protein, 58 aa, synthetic construct
  REGION 1..58: note = Engineered IL-1R-I binding polypeptide
VDAKYAKEVHDAYEEIFILPNLTRKQYTAFIRKLLDDPSQSSELLSEAKKLNDSQAPK

SEQ ID NO: 664 - protein, 58 aa, synthetic construct
  REGION 1..58: note = Engineered IL-1R-I binding polypeptide
VDAKYAKEVEVAYMEIFNLPNLTRKQYTAFIRKLLDDPSQSSELLSEAKKLNDSQAPK

SEQ ID NO: 665 - protein, 58 aa, synthetic construct
  REGION 1..58: note = Engineered IL-1R-I binding polypeptide
VDAKYAKEAEHAYFEIFALPNLTRKQYTAFIRKLLDDPSQSSELLSEAKKLNDSQAPK

SEQ ID NO: 666 - protein, 58 aa, synthetic construct
  REGION 1..58: note = Engineered IL-1R-I binding polypeptide
VDAKYAKEIEVAQMEIYNLPNLTRKQYTAFIRKLLDDPSQSSELLSEAKKLNDSQAPK

SEQ ID NO: 667 - protein, 58 aa, synthetic construct
  REGION 1..58: note = Engineered IL-1R-I binding polypeptide
VDAKYAKEAEDAYMEIYALPNLTRKQYTAFIRKLLDDPSQSSELLSEAKKLNDSQAPK

SEQ ID NO: 668 - protein, 58 aa, synthetic construct
  REGION 1..58: note = Engineered IL-1R-I binding polypeptide
VDAKYAKEVEHAYFEIFALPNLTRKQYTAFIRKLLDDPSQSSELLSEAKKLNDSQAPK

SEQ ID NO: 669 - protein, 58 aa, synthetic construct
  REGION 1..58: note = Engineered IL-1R-I binding polypeptide
VDAKYAKETENAYFEIYHLPNLTRKQYTAFIRKLLDDPSQSSELLSEAKKLNDSQAPK

SEQ ID NO: 670 - protein, 58 aa, synthetic construct
  REGION 1..58: note = Engineered IL-1R-I binding polypeptide
VDAKYAKEVEQAYFEIFALPNLTRKQYTAFIRKLLDDPSQSSELLSEAKKLNDSQAPK

SEQ ID NO: 671 - protein, 58 aa, synthetic construct
  REGION 1..58: note = Engineered IL-1R-I binding polypeptide
VDAKYAKEAEDAYMEIYSLPNLTRKQYTAFIRKLLDDPSQSSELLSEAKKLNDSQAPK

SEQ ID NO: 672 - protein, 58 aa, synthetic construct
  REGION 1..58: note = Engineered IL-1R-I binding polypeptide
VDAKYAKEVEDAYEEIYQLPNLTRKQYTAFIRKLLDDPSQSSELLSEAKKLNDSQAPK

SEQ ID NO: 673 - protein, 58 aa, synthetic construct
  REGION 1..58: note = Engineered IL-1R-I binding polypeptide
VDAKYAKELESAYFEIYGLPNLTRRQYTAFIRKLLDDPSQSSELLSEAKKLNDSQAPK

SEQ ID NO: 674 - protein, 58 aa, synthetic construct
  REGION 1..58: note = Engineered IL-1R-I binding polypeptide
VDAKYAKEVVTAYYEIFELPNLTRKQYTAFIRKLLDDPSQSSELLSEAKKLNDSQAPK

SEQ ID NO: 675 - protein, 58 aa, synthetic construct
  REGION 1..58: note = Engineered IL-1R-I binding polypeptide
VDAKYAKEQEDAYWEIYGLPNLTRKQYTAFIRKLLDDPSQSSELLSEAKKLNDSQAPK

SEQ ID NO: 676 - protein, 58 aa, synthetic construct
  REGION 1..58: note = Engineered IL-1R-I binding polypeptide
VDAKYAKEVQAAYFEIFALPNLTRRQYTAFIRKLLDDPSQSSELLSEAKKLNDSQAPK

SEQ ID NO: 677 - protein, 58 aa, synthetic construct
  REGION 1..58: note = Engineered IL-1R-I binding polypeptide
VDAKYAKEAVNAYFEIYELPNLTRKQYTAFIRKLLDDPSQSSELLSEAKKLNDSQAPK

SEQ ID NO: 678 - protein, 58 aa, synthetic construct
  REGION 1..58: note = Engineered IL-1R-I binding polypeptide
VDAKYAKEVEHAQMEIYGLPNLTRKQYTAFIRKLLDDPSQSSELLSEAKKLNDSQAPK

SEQ ID NO: 679 - protein, 58 aa, synthetic construct
  REGION 1..58: note = Engineered IL-1R-I binding polypeptide
VDAKYAKEVEAAYFEIYSLPNLTRKQYTAFIRKLLDDPSQSSELLSEAKKLNDSQAPK

SEQ ID NO: 680 - protein, 58 aa, synthetic construct
  REGION 1..58: note = Engineered IL-1R-I binding polypeptide
VDAKYAKEIEIAQMEIFALPNLTRKQYTAFIRKLLDDPSQSSELLSEAKKLNDSQAPK

SEQ ID NO: 681 - protein, 58 aa, synthetic construct
  REGION 1..58: note = Engineered IL-1R-I binding polypeptide
VDAKYAKELENAYFEIYGLPNLTRKQYTAFIRKLLDDPSQSSELLSEAKKLNDSQAPK

SEQ ID NO: 682 - protein, 58 aa, synthetic construct
  REGION 1..58: note = Engineered IL-1R-I binding polypeptide
VDAKYAKEVEAAYFEIYNLPNLTRKQYTAFIRKLLDDPSQSSELLSEAKKLNDSQAPK

SEQ ID NO: 683 - protein, 58 aa, synthetic construct
  REGION 1..58: note = Engineered IL-1R-I binding polypeptide
VDAKYAKELEWAQMEIFYLPNLTRKQYTAFIRKLLDDPSQSSELLSEAKKLNDSQAPK

SEQ ID NO: 684 - protein, 58 aa, synthetic construct
  REGION 1..58: note = Engineered IL-1R-I binding polypeptide
VDAKYAKEADDAYWEIYALPNLTRKQYTAFIRKLLDDPSQSSELLSEAKKLNDSQAPK

SEQ ID NO: 685 - protein, 58 aa, synthetic construct
  REGION 1..58: note = Engineered IL-1R-I binding polypeptide
VDAKYAKEVELAQMEIFKLPNLTRRQYTAFIRKLLDDPSQSSELLSEAKKLNDSQAPK

SEQ ID NO: 686 - protein, 58 aa, synthetic construct
  REGION 1..58: note = Engineered IL-1R-I binding polypeptide
VDAKYAKEIHEAQMEIFKLPNLTRKQYTAFIRKLLDDPSQSSELLSEAKKLNDSQAPK

SEQ ID NO: 687 - protein, 58 aa, synthetic construct
  REGION 1..58: note = Engineered IL-1R-I binding polypeptide
VDAKYAKEVEYAYFEIFKLPNLTRKQYTAFIRKLLDDPSQSSELLSEAKKLNDSQAPK

SEQ ID NO: 688 - protein, 58 aa, synthetic construct
  REGION 1..58: note = Engineered IL-1R-I binding polypeptide
VDAKYAKEAYTAQMEIFSLPNLTRKQYTAFIRKLLDDPSQSSELLSEAKKLNDSQAPK

SEQ ID NO: 689 - protein, 58 aa, synthetic construct
  REGION 1..58: note = Engineered IL-1R-I binding polypeptide
VDAKYAKEAENAYWEIYALPNLTRKQYTAFIRKLLDDPSQSSELLSEAKKLNDSQAPK

SEQ ID NO: 690 - protein, 58 aa, synthetic construct
  REGION 1..58: note = Engineered IL-1R-I binding polypeptide
VDAKYAKEVERAYMEIFGLPNLTRKQYTAFIRKLLDDPSQSSELLSEAKKLNDSQAPK

SEQ ID NO: 691 - protein, 58 aa, synthetic construct
  REGION 1..58: note = Engineered IL-1R-I binding polypeptide
VDAKYAKEIEEAQMEIFWLPNLTRKQYTAFIRKLLDDPSQSSELLSEAKKLNDSQAPK

SEQ ID NO: 692 - protein, 58 aa, synthetic construct
  REGION 1..58: note = Engineered IL-1R-I binding polypeptide
VDAKYAKEIEDAYMEIYALPNLTRKQYTAFIRKLLDDPSQSSELLSEAKKLNDSQAPK

SEQ ID NO: 693 - protein, 58 aa, synthetic construct
  REGION 1..58: note = Engineered IL-1R-I binding polypeptide
VDAKYAKEVVKAYYEIYELPNLTRRQYTAFIRKLLDDPSQSSELLSEAKKLNDSQAPK

SEQ ID NO: 694 - protein, 58 aa, synthetic construct
  REGION 1..58: note = Engineered IL-1R-I binding polypeptide
VDAKYAKELENAYAEIFHLPNLTRKQYTAFIRKLLDDPSQSSELLSEAKKLNDSQAPK

SEQ ID NO: 695 - protein, 58 aa, synthetic construct
  REGION 1..58: note = Engineered IL-1R-I binding polypeptide
VDAKYAKEQISAYWEIYALPNLTRKQYTAFIRKLLDDPSQSSELLSEAKKLNDSQAPK

SEQ ID NO: 696 - protein, 58 aa, synthetic construct
  REGION 1..58: note = Engineered IL-1R-I binding polypeptide
VDAKYAKETEDAYMEIYNLPNLTRKQYTAFIRKLLDDPSQSSELLSEAKKLNDSQAPK

SEQ ID NO: 697 - protein, 58 aa, synthetic construct
  REGION 1..58: note = Engineered IL-1R-I binding polypeptide
VDAKYAKEVEDAYMEIYNLPNLTRKQYTAFIRKLLDDPSQSSELLSEAKKLNDSQAPK

SEQ ID NO: 698 - protein, 58 aa, synthetic construct
  REGION 1..58: note = Engineered IL-1R-I binding polypeptide
VDAKYAKEVEDAQYEIFDLPNLTRKQYTAFIRKLLDDPSQSSELLSEAKKLNDSQAPK

SEQ ID NO: 699 - protein, 58 aa, synthetic construct
  REGION 1..58: note = Engineered IL-1R-I binding polypeptide
VDAKYAKEVERAQMEIFDLPNLTRKQYTAFIRKLFDDPSQSSELLSEAKKLNDSQAPK

SEQ ID NO: 700 - protein, 58 aa, synthetic construct
  REGION 1..58: note = Engineered IL-1R-I binding polypeptide
VDAKYAKEAHEAQMEIFYLPNLTRKQYTAFIRKLLDDPSQSSELLSEAKKLNDSQAPK

SEQ ID NO: 701 - protein, 58 aa, synthetic construct
  REGION 1..58: note = Engineered IL-1R-I binding polypeptide
VDAKYAKETYNAQQEIFNLPNLTRRQYTAFIRKLLDDPSQSSELLSEAKKLNDSQAPK

SEQ ID NO: 702 - protein, 58 aa, synthetic construct
  REGION 1..58: note = Engineered IL-1R-I binding polypeptide
VDAKYAKEVEDAQLEIFALPNLTRKQYTAFIRKLLDDPSQSSELLSEAKKLNDSQAPK

SEQ ID NO: 703 - protein, 58 aa, synthetic construct
  REGION 1..58: note = Engineered IL-1R-I binding polypeptide
VDAKYAKEIEKAQMEIFFLPNLTRKQYTAFIRKLFDDPSQSSELLSEAKKLNDSQAPK

SEQ ID NO: 704 - protein, 58 aa, synthetic construct
  REGION 1..58: note = Engineered IL-1R-I binding polypeptide
VDAKYAKEIEKAQMEIFGLPNLTRKQYTAFIRKLLDDPSQSSELLSEAKKLNDSQAPK

SEQ ID NO: 705 - protein, 58 aa, synthetic construct
  REGION 1..58: note = Engineered IL-1R-I binding polypeptide
VDAKYAKEVELAQMEIFALPNLTRKQYTAFIRKLFDDPSQSSELLSEAKKLNDSQAPK

SEQ ID NO: 706 - protein, 58 aa, synthetic construct
  REGION 1..58: note = Engineered IL-1R-I binding polypeptide
VDAKYAKEVEHAQMEIFNLPNLTRKQYTAFIRKLLDDPSQSSELLSEAKKLNDSQAPK

SEQ ID NO: 707 - protein, 58 aa, synthetic construct
  REGION 1..58: note = Engineered IL-1R-I binding polypeptide
VDAKYAKETESAQMEIFGLPNLTRKQYTAFIRKLLDDPSQSSELLSEAKKLNDSQAPK

SEQ ID NO: 708 - protein, 58 aa, synthetic construct
  REGION 1..58: note = Engineered IL-1R-I binding polypeptide
VDAKYAKEIEVAQLEIFKLPNLTRKQYTAFIRKLFDDPSQSSELLSEAKKLNDSQAPK

SEQ ID NO: 709 - protein, 58 aa, synthetic construct
  REGION 1..58: note = Engineered IL-1R-I binding polypeptide
VDAKYAKEVETAQMEIFALPNLTRRQYTAFIRKLLDDPSQSSELLSEAKKLNDSQAPK

SEQ ID NO: 710 - protein, 58 aa, synthetic construct
  REGION 1..58: note = Engineered IL-1R-I binding polypeptide
VDAKYAKELESAQMEIFYLPNLTRKQYTAFIRKLLDDPSQSSELLSEAKKLNDSQAPK

SEQ ID NO: 711 - protein, 58 aa, synthetic construct
  REGION 1..58: note = Engineered IL-1R-I binding polypeptide
VDAKYAKETEEAQMEIFGLPNLTRKQYTAFIRKLLDDPSQSSELLSEAKKLNDSQAPK

SEQ ID NO: 712 - protein, 58 aa, synthetic construct
  REGION 1..58: note = Engineered IL-1R-I binding polypeptide
VDAKYAKEVEVAQMEIFNLPNLTRKQYTAFIRKLLDDPSQSSELLSEAKKLNDSQAPK

SEQ ID NO: 713 - protein, 58 aa, synthetic construct
  REGION 1..58: note = Engineered IL-1R-I binding polypeptide
VDAKYAKEVIVAYEEIFQLPNLTRKQYTAFIRKLLDDPSQSSELLSEAKKLNDSQAPK

SEQ ID NO: 714 - protein, 58 aa, synthetic construct
  REGION 1..58: note = Engineered IL-1R-I binding polypeptide
VDAKYAKEVETAQMEIFSLPNLTRKQYTAFIRKLLDDPSQSSELLSEAKKLNDSQAPK

SEQ ID NO: 715 - protein, 58 aa, synthetic construct
  REGION 1..58: note = Engineered IL-1R-I binding polypeptide
VDAKYAKEIEAAQMEIFNLPNLTRKQYTAFIRKLLDDPSQSSELLSEAKKLNDSQAPK

SEQ ID NO: 716 - protein, 58 aa, synthetic construct
  REGION 1..58: note = Engineered IL-1R-I binding polypeptide
VDAKYAKELEKAQMEIFNLPNLTRKQYTAFIRKLLDDPSQSSELLSEAKKLNDSQAPK

SEQ ID NO: 717 - protein, 58 aa, synthetic construct
  REGION 1..58: note = Engineered IL-1R-I binding polypeptide
VDAKYAKETESAQMEIFALPNLTRKQYTAFIRKLLDDPSQSSELLSEAKKLNDSQAPK

SEQ ID NO: 718 - protein, 58 aa, synthetic construct
  REGION 1..58: note = Engineered IL-1R-I binding polypeptide
VDAKYAKELESAQMEIFALPNLTRKQYTAFIRKLFDDPSQSSELLSEAKKLNDSQAPK

SEQ ID NO: 719 - protein, 58 aa, synthetic construct
  REGION 1..58: note = Engineered IL-1R-I binding polypeptide
VDAKYAKETEDAQMEIYRLPNLTRKQYTAFIRKLLDDPSQSSELLSEAKKLNDSQAPK

SEQ ID NO: 720 - protein, 58 aa, synthetic construct
  REGION 1..58: note = Engineered IL-1R-I binding polypeptide
VDAKYAKEIYVAQMEIFGLPNLTRKQYTAFIRKLLDDPSQSSELLSEAKKLNDSQAPK

SEQ ID NO: 721 - protein, 58 aa, synthetic construct
  REGION 1..58: note = Engineered IL-1R-I binding polypeptide
VDAKYAKETEQAQMEIFSLPNLTRRQYTAFIRKLLDDPSQSSELLSEAKKLNDSQAPK

SEQ ID NO: 722 - protein, 58 aa, synthetic construct
  REGION 1..58: note = Engineered IL-1R-I binding polypeptide
VDAKYAKEAYKAQMEIFKLPNLTRRQYTAFIRKLLDDPSQSSELLSEAKKLNDSQAPK

SEQ ID NO: 723 - protein, 58 aa, synthetic construct
  REGION 1..58: note = Engineered IL-1R-I binding polypeptide
VDAKYAKEIEDAQMEIFELPNLTRRQYTAFIRKLLDDPSQSSELLSEAKKLNDSQAPK

SEQ ID NO: 724 - protein, 58 aa, synthetic construct
  REGION 1..58: note = Engineered IL-1R-I binding polypeptide
VDAKYAKEVEIAQMEIFNLPNLTRKQYTAFIRKLLDDPSQSSELLSEAKKLNDSQAPK

SEQ ID NO: 725 - protein, 58 aa, synthetic construct
  REGION 1..58: note = Engineered IL-1R-I binding polypeptide
VDAKYAKEVEFAYMEIFRLPNLTRKQYTAFIRKLLDDPSQSSELLSEAKKLNDSQAPK

SEQ ID NO: 726 - protein, 58 aa, synthetic construct
  REGION 1..58: note = Engineered IL-1R-I binding polypeptide
VDAKYAKEIERAQMEIYELPNLTRKQYTAFIRKLFDDPSQSSELLSEAKKLNDSQAPK

SEQ ID NO: 727 - protein, 58 aa, synthetic construct
  REGION 1..58: note = Engineered IL-1R-I binding polypeptide
VDAKYAKEVDEAYMEIYNLPNLTRRQYTAFIRKLLDDPSQSSELLSEAKKLNDSQAPK

SEQ ID NO: 728 - protein, 58 aa, synthetic construct
  REGION 1..58: note = Engineered IL-1R-I binding polypeptide
VDAKYAKEVEEAQLEIFALPNLTRKQYTAFIRKLFDDPSQSSELLSEAKKLNDSQAPK

SEQ ID NO: 729 - protein, 58 aa, synthetic construct
  REGION 1..58: note = Engineered IL-1R-I binding polypeptide
VDAKYAKETHDAQMEIFELPNLTRKQYTAFIRKLFDDPSQSSELLSEAKKLNDSQAPK

SEQ ID NO: 730 - protein, 58 aa, synthetic construct
  REGION 1..58: note = Engineered IL-1R-I binding polypeptide
VDAKYAKETEDAQMEIFGLPNLTRKQYTAFIRKLLDDPSQSSELLSEAKKLNDSQAPK

SEQ ID NO: 731 - protein, 58 aa, synthetic construct
  REGION 1..58: note = Engineered IL-1R-I binding polypeptide
VDAKYAKETERAYYEIFALPNLTRKQYTAFIRKLLDDPSQSSELLSEAKKLNDSQAPK

SEQ ID NO: 732 - protein, 58 aa, synthetic construct
  REGION 1..58: note = Engineered IL-1R-I binding polypeptide
VDAKYAKEVEDAQMEIYYLPNLTRRQYTAFIRKLLDDPSQSSELLSEAKKLNDSQAPK

SEQ ID NO: 733 - protein, 58 aa, synthetic construct
  REGION 1..58: note = Engineered IL-1R-I binding polypeptide
VDAKYAKEAEQAYFEIYELPNLTRRQYTAFIRKLLDDPSQSSELLSEAKKLNDSQAPK

SEQ ID NO: 734 - protein, 58 aa, synthetic construct
  REGION 1..58: note = Engineered IL-1R-I binding polypeptide
VDAKYAKEVEEAQMEIFNLPNLTRRQYTAFIRKLLDDPSQSSELLSEAKKLNDSQAPK

SEQ ID NO: 735 - protein, 58 aa, synthetic construct
  REGION 1..58: note = Engineered IL-1R-I binding polypeptide
VDAKYAKEVEVAQMEIFNLPNLTRKQYTAFIRKLFDDPSQSSELLSEAKKLNDSQAPK

SEQ ID NO: 736 - protein, 58 aa, synthetic construct
  REGION 1..58: note = Engineered IL-1R-I binding polypeptide
VDAKYAKEIEQAQMEIYFLPNLTRKQYTAFIIKLFDDPSQSSELLSEAKKLNDSQAPK

SEQ ID NO: 737 - protein, 58 aa, synthetic construct
  REGION 1..58: note = Engineered IL-1R-I binding polypeptide
VDAKYAKEVEWAQMEIFYLPNLTRKQYTAFIRKLFDDPSQSSELLSEAKKLNDSQAPK

SEQ ID NO: 738 - protein, 58 aa, synthetic construct
  REGION 1..58: note = Engineered IL-1R-I binding polypeptide
VDAKYAKEVESAQMEIFKLPNLTRKQYTAFIRKLFDDPSQSSELLSEAKKLNDSQAPK

SEQ ID NO: 739 - protein, 58 aa, synthetic construct
  REGION 1..58: note = Engineered IL-1R-I binding polypeptide
VDAKYAKEAEVAQMEIFALPNLTRKQYTAFIRKLLDDPSQSSELLSEAKKLNDSQAPK

SEQ ID NO: 740 - protein, 58 aa, synthetic construct
  REGION 1..58: note = Engineered IL-1R-I binding polypeptide
VDAKYAKEIEKAQMEIYYLPNLTRKQYTAFIRKLLDDPSQSSELLSEAKKLNDSQAPK

SEQ ID NO: 741 - protein, 58 aa, synthetic construct
  REGION 1..58: note = Engineered IL-1R-I binding polypeptide
VDAKYAKEIEKAQLEIFALPNLTRKQYTAFIRKLFDDPSQSSELLSEAKKLNDSQAPK

SEQ ID NO: 742 - protein, 58 aa, synthetic construct
  REGION 1..58: note = Engineered IL-1R-I binding polypeptide
VDAKYAKETERAQMEIFQLPNLTRKQYTAFIRKLLDDPSQSSELLSEAKKLNDSQAPK

SEQ ID NO: 743 - protein, 58 aa, synthetic construct
  REGION 1..58: note = Engineered IL-1R-I binding polypeptide
VDAKYAKEVQDAQMEIFYLPNLTRKQYTAFIRKLLDDPSQSSELLSEAKKLNDSQAPK

SEQ ID NO: 744 - protein, 58 aa, synthetic construct
  REGION 1..58: note = Engineered IL-1R-I binding polypeptide
VDAKYAKEIEAAQMEIFVLPNLTRKQYTAFIRKLLDDPSQSSELLSEAKKLNDSQAPK

SEQ ID NO: 745 - protein, 58 aa, synthetic construct
  REGION 1..58: note = Engineered IL-1R-I binding polypeptide
VDAKYAKELQRAQMEIFELPNLTRRQYTAFIRKLFDDPSQSSELLSEAKKLNDSQAPK

SEQ ID NO: 746 - protein, 58 aa, synthetic construct
  REGION 1..58: note = Engineered IL-1R-I binding polypeptide
VDAKYAKELEEAQMEIFLLPNLTRRQYTAFIRKLLDDPSQSSELLSEAKKLNDSQAPK

SEQ ID NO: 747 - protein, 58 aa, synthetic construct
  REGION 1..58: note = Engineered IL-1R-I binding polypeptide
VDAKYAKEIEHAQMEIFALPNLTRKQYTAFIRKLFDDPSQSSELLSEAKKLNDSQAPK

SEQ ID NO: 748 - protein, 58 aa, synthetic construct
  REGION 1..58: note = Engineered IL-1R-I binding polypeptide
VDAKYAKEVYQAQMEIFGLPNLTRKQYTAFIRKLLDDPSQSSELLSEAKKLNDSQAPK

SEQ ID NO: 749 - protein, 58 aa, synthetic construct
  REGION 1..58: note = Engineered IL-1R-I binding polypeptide
VDAKYAKEIEAAQMEIFYLPNLTRRQYTAFIRKLFDDPSQSSELLSEAKKLNDSQAPK

SEQ ID NO: 750 - protein, 58 aa, synthetic construct
  REGION 1..58: note = Engineered IL-1R-I binding polypeptide
VDAKYAKEAKDAQMEIFGLPNLTRRQYTAFIRKLLDDPSQSSELLSEAKKLNDSQAPK

SEQ ID NO: 751 - protein, 58 aa, synthetic construct
  REGION 1..58: note = Engineered IL-1R-I binding polypeptide
VDAKYAKEVETAYMEIYYLPNLTRKQYTAFIRKLLDDPSQSSELLSEAKKLNDSQAPK

SEQ ID NO: 752 - protein, 58 aa, synthetic construct
  REGION 1..58: note = Engineered IL-1R-I binding polypeptide
VDAKYAKEVEAAQMEIYALPNLTRKQYTAFIRKLLDDPSQSSELLSEAKKLNDSQAPK

SEQ ID NO: 753 - protein, 58 aa, synthetic construct
  REGION 1..58: note = Engineered IL-1R-I binding polypeptide
VDAKYAKEVEAAYWEIFKLPNLTRKQYTAFIRKLLDDPSQSSELLSEAKKLNDSQAPK

SEQ ID NO: 754 - protein, 58 aa, synthetic construct
  REGION 1..58: note = Engineered IL-1R-I binding polypeptide
VDAKYAKEIEQAQMEIYELPNLTRKQYTAFIRKLLDDPSQSSELLSEAKKLNDSQAPK

SEQ ID NO: 755 - protein, 58 aa, synthetic construct
  REGION 1..58: note = Engineered IL-1R-I binding polypeptide
VDAKYAKETEEAYFEIYELPNLTRKQYTAFIRKLLDDPSQSSELLSEAKKLNDSQAPK

SEQ ID NO: 756 - protein, 58 aa, synthetic construct
  REGION 1..58: note = Engineered IL-1R-I binding polypeptide
VDAKYAKEVEWAQMEIFKLPNLTRRQYTAFIRKLLDDPSQSSELLSEAKKLNDSQAPK

SEQ ID NO: 757 - protein, 58 aa, synthetic construct
  REGION 1..58: note = Engineered IL-1R-I binding polypeptide
VDAKYAKEIEIAQMEIFELPNLTRKQYTAFIRKLLDDPSQSSELLSEAKKLNDSQAPK

SEQ ID NO: 758 - protein, 58 aa, synthetic construct
  REGION 1..58: note = Engineered IL-1R-I binding polypeptide
VDAKYAKEAEAAQMEIFALPNLTRKQYTAFIRKLLDDPSQSSELLSEAKKLNDSQAPK

SEQ ID NO: 759 - protein, 58 aa, synthetic construct
  REGION 1..58: note = Engineered IL-1R-I binding polypeptide
VDAKYAKEVVSAYEEIFHLPNLTRKQYTAFIRKLLDDPSQSSELLSEAKKLNDSQAPK

SEQ ID NO: 760 - protein, 58 aa, synthetic construct
  REGION 1..58: note = Engineered IL-1R-I binding polypeptide
VDAKYAKETEDAQMEIFALPNLTRRQYTAFIRKLLDDPSQSSELLSEAKKLNDSQAPK

SEQ ID NO: 761 - protein, 58 aa, synthetic construct
  REGION 1..58: note = Engineered IL-1R-I binding polypeptide
VDAKYAKEVEFAQMEIFELPNLTRKQYTAFIRKLLDDPSQSSELLSEAKKLNDSQAPK

SEQ ID NO: 762 - protein, 58 aa, synthetic construct
  REGION 1..58: note = Engineered IL-1R-I binding polypeptide
VDAKYAKEVQNAQMEIFALPNLTRKQYTAFIRKLLDDPSQSSELLSEAKKLNDSQAPK

SEQ ID NO: 763 - protein, 58 aa, synthetic construct
  REGION 1..58: note = Engineered IL-1R-I binding polypeptide
VDAKYAKEAQRAYMEIYQLPNLTRKQYTAFIRKLLDDPSQSSELLSEAKKLNDSQAPK

SEQ ID NO: 764 - protein, 58 aa, synthetic construct
  REGION 1..58: note = Engineered IL-1R-I binding polypeptide
VDAKYAKEIEDAQMEIYGLPNLTRKQYTAFIRKLLDDPSQSSELLSEAKKLNDSQAPK

SEQ ID NO: 765 - protein, 58 aa, synthetic construct
  REGION 1..58: note = Engineered IL-1R-I binding polypeptide
VDAKYAKEVEYAQMEIFSLPNLTRKQYTAFIRKLFDDPSQSSELLSEAKKLNDSQAPK

SEQ ID NO: 766 - protein, 58 aa, synthetic construct
  REGION 1..58: note = Engineered IL-1R-I binding polypeptide
VDAKYAKEAEDAQMEIFALPNLTRRQYTAFIRKLLDDPSQSSELLSEAKKLNDSQAPK

SEQ ID NO: 767 - protein, 58 aa, synthetic construct
  REGION 1..58: note = Engineered IL-1R-I binding polypeptide
VDAKYAKEVESAQMEIFDLPNLTRKQYTAFIRKLFDDPSQSSELLSEAKKLNDSQAPK

SEQ ID NO: 768 - protein, 58 aa, synthetic construct
  REGION 1..58: note = Engineered IL-1R-I binding polypeptide
VDAKYAKEVDVAYMEIFGLPNLTRKQYTAFIRKLLDDPSQSSELLSEAKKLNDSQAPK

SEQ ID NO: 769 - protein, 58 aa, synthetic construct
  REGION 1..58: note = Engineered IL-1R-I binding polypeptide
VDAKYAKEVEDAQMEIFSLPNLTRKQYTAFIRKLFDDPSQSSELLSEAKKLNDSQAPK

SEQ ID NO: 770 - protein, 58 aa, synthetic construct
  REGION 1..58: note = Engineered IL-1R-I binding polypeptide
VDAKYAKEVEAAQMEIFDLPNLTRKQYTAFIRKLLDDPSQSSELLSEAKKLNDSQAPK

SEQ ID NO: 771 - protein, 58 aa, synthetic construct
  REGION 1..58: note = Engineered IL-1R-I binding polypeptide
VDAKYAKEVEDAYFEIYLLPNLTRKQYTAFIRKLLDDPSQSSELLSEAKKLNDSQAPK

SEQ ID NO: 772 - protein, 58 aa, synthetic construct
  REGION 1..58: note = Engineered IL-1R-I binding polypeptide
VDAKYAKEVEKAQMEIFTLPNLTRKQYTAFIRKLFDDPSQSSELLSEAKKLNDSQAPK

SEQ ID NO: 773 - protein, 58 aa, synthetic construct
  REGION 1..58: note = Engineered IL-1R-I binding polypeptide
VDAKYAKELEKAYFEIYELPNLTRKQYTAFIRKLLDDPSQSSELLSEAKKLNDSQAPK

SEQ ID NO: 774 - protein, 58 aa, synthetic construct
  REGION 1..58: note = Engineered IL-1R-I binding polypeptide
VDAKYAKEVEAAQMEIFALPNLTRKQYTAFIRKLFDDPSQSSELLSEAKKLNDSQAPK

SEQ ID NO: 775 - protein, 58 aa, synthetic construct
  REGION 1..58: note = Engineered IL-1R-I binding polypeptide
VDAKYAKEIREAQMEIFGLPNLTRKQYTAFIRKLFDDPSQSSELLSEAKKLNDSQAPK

SEQ ID NO: 776 - protein, 58 aa, synthetic construct
  REGION 1..58: note = Engineered IL-1R-I binding polypeptide
VDAKYAKEVENAQMEIYNLPNLTRKQYTAFIRKLFDDPSQSSELLSEAKKLNDSQAPK

SEQ ID NO: 777 - protein, 58 aa, synthetic construct
  REGION 1..58: note = Engineered IL-1R-I binding polypeptide
VDAKYAKEVEDAQMEIYDLPNLTRKQYTAFIRKLFDDPSQSSELLSEAKKLNDSQAPK

SEQ ID NO: 778 - protein, 58 aa, synthetic construct
  REGION 1..58: note = Engineered IL-1R-I binding polypeptide
VDAKYAKEVEVAQMEIFGLPNLTRRQYTAFIRKLLDDPSQSSELLSEAKKLNDSQAPK

SEQ ID NO: 779 - protein, 58 aa, synthetic construct
  REGION 1..58: note = Engineered IL-1R-I binding polypeptide
VDAKYAKEVEHAQMEIYYLPNLTRKQYTAFIRKLLDDPSQSSELLSEAKKLNDSQAPK

SEQ ID NO: 780 - protein, 58 aa, synthetic construct
  REGION 1..58: note = Engineered IL-1R-I binding polypeptide
VDAKYAKEAETAQMEIFALPNLTRKQYTAFIRKLLDDPSQSSELLSEAKKLNDSQAPK

SEQ ID NO: 781 - protein, 58 aa, synthetic construct
  REGION 1..58: note = Engineered IL-1R-I binding polypeptide
VDAKYAKEIEQAQMEIFRLPNLTRKQYTAFIRKLLDDPSQSSELLSEAKKLNDSQAPK

SEQ ID NO: 782 - protein, 58 aa, synthetic construct
  REGION 1..58: note = Engineered IL-1R-I binding polypeptide
VDAKYAKEVEAAQMEIFYLPNLTRKQYTAFIRKLFDDPSQSSELLSEAKKLNDSQAPK

SEQ ID NO: 783 - protein, 58 aa, synthetic construct
  REGION 1..58: note = Engineered IL-1R-I binding polypeptide
VDAKYAKEVHEAQMEIFYLPNLTRRQYTAFIRKLLDDPSQSSELLSEAKKLNDSQAPK

SEQ ID NO: 784 - protein, 58 aa, synthetic construct
  REGION 1..58: note = Engineered IL-1R-I binding polypeptide
VDAKYAKEVEHAYMEIFHLPNLTRKQYTAFIRKLLDDPSQSSELLSEAKKLNDSQAPK

SEQ ID NO: 785 - protein, 58 aa, synthetic construct
  REGION 1..58: note = Engineered IL-1R-I binding polypeptide
VDAKYAKEIEKAQMEIFDLPNLTRKQYTAFIRKLFDDPSQSSELLSEAKKLNDSQAPK

SEQ ID NO: 786 - protein, 58 aa, synthetic construct
  REGION 1..58: note = Engineered IL-1R-I binding polypeptide
VDAKYAKETEAAQMEIYNLPNLTRKQYTAFIRKLFDDPSQSSELLSEAKKLNDSQAPK

SEQ ID NO: 787 - protein, 58 aa, synthetic construct
  REGION 1..58: note = Engineered IL-1R-I binding polypeptide
VDAKYAKEVHEAQMEIYNLPNLTRKQYTAFIRKLLDDPSQSSELLSEAKKLNDSQAPK

SEQ ID NO: 788 - protein, 58 aa, synthetic construct
  REGION 1..58: note = Engineered IL-1R-I binding polypeptide
VDAKYAKEIQDAQMEIYYLPNLTRKQYTAFIRKLLDDPSQSSELLSEAKKLNDSQAPK

SEQ ID NO: 789 - protein, 58 aa, synthetic construct
  REGION 1..58: note = Engineered IL-1R-I binding polypeptide
VDAKYAKEVEQAQMEIFLLPNLTRKQYTAFIRKLLDDPSQSSELLSEAKKLNDSQAPK

SEQ ID NO: 790 - protein, 58 aa, synthetic construct
  REGION 1..58: note = Engineered IL-1R-I binding polypeptide
VDAKYAKETEIAQMEIFELPNLTRKQYTAFIRKLLDDPSQSSELLSEAKKLNDSQAPK

SEQ ID NO: 791 - protein, 58 aa, synthetic construct
  REGION 1..58: note = Engineered IL-1R-I binding polypeptide
VDAKYAKEIEEAQLEIFELPNLTRKQYTAFIRKLFDDPSQSSELLSEAKKLNDSQAPK

SEQ ID NO: 792 - protein, 58 aa, synthetic construct
  REGION 1..58: note = Engineered IL-1R-I binding polypeptide
VDAKYAKELERAQMEIFVLPNLTRKQYTAFIRKLLDDPSQSSELLSEAKKLNDSQAPK

SEQ ID NO: 793 - protein, 58 aa, synthetic construct
  REGION 1..58: note = Engineered IL-1R-I binding polypeptide
VDAKYAKETEIAQMEIYSLPNLTRKQYTAFIRKLLDDPSQSSELLSEAKKLNDSQAPK

SEQ ID NO: 794 - protein, 58 aa, synthetic construct
  REGION 1..58: note = Engineered IL-1R-I binding polypeptide
VDAKYAKEAEDAYMEIFRLPNLTRKQYTAFIRKLLDDPSQSSELLSEAKKLNDSQAPK

SEQ ID NO: 795 - protein, 58 aa, synthetic construct
  REGION 1..58: note = Engineered IL-1R-I binding polypeptide
VDAKYAKEVEQAQLEIFSLPNLTRKQYTAFIRKLFDDPSQSSELLSEAKKLNDSQAPK

SEQ ID NO: 796 - protein, 58 aa, synthetic construct
  REGION 1..58: note = Engineered IL-1R-I binding polypeptide
VDAKYAKEIEFAQMEIFYLPNLTRKQYTAFIRKLLDDPSQSSELLSEAKKLNDSQAPK

SEQ ID NO: 797 - protein, 58 aa, synthetic construct
  REGION 1..58: note = Engineered IL-1R-I binding polypeptide
VDAKYAKEIEEAQMEIFFLPNLTRKQYTAFIRKLLDDPSQSSELLSEAKKLNDSQAPK

SEQ ID NO: 798 - protein, 58 aa, synthetic construct
  REGION 1..58: note = Engineered IL-1R-I binding polypeptide
VDAKYAKETYHAQMEIYSLPNLTRKQYTAFIRKLLDDPSQSSELLSEAKKLNDSQAPK

SEQ ID NO: 799 - protein, 58 aa, synthetic construct
  REGION 1..58: note = Engineered IL-1R-I binding polypeptide
VDAKYAKEAEQAYHEIYQLPNLTRKQYTAFIRKLLDDPSQSSELLSEAKKLNDSQAPK

SEQ ID NO: 800 - protein, 58 aa, synthetic construct
  REGION 1..58: note = Engineered IL-1R-I binding polypeptide
VDAKYAKETETAQMEIFSLPNLTRKQYTAFIRKLFDDPSQSSELLSEAKKLNDSQAPK

SEQ ID NO: 801 - protein, 58 aa, synthetic construct
  REGION 1..58: note = Engineered IL-1R-I binding polypeptide
VDAKYAKEAEEAYQEIFHLPNLTRKQYTAFIRKLLDDPSQSSELLSEAKKLNDSQAPK

SEQ ID NO: 802 - protein, 58 aa, synthetic construct
  REGION 1..58: note = Engineered IL-1R-I binding polypeptide
VDAKYAKETEVAQMEIYELPNLTRKQYTAFIRKLLDDPSQSSELLSEAKKLNDSQAPK

SEQ ID NO: 803 - protein, 58 aa, synthetic construct
  REGION 1..58: note = Engineered IL-1R-I binding polypeptide
VDAKYAKEVEIAQMEIYELPNLTRKQYTAFIRKLLDDPSQSSELLSEAKKLNDSQAPK

SEQ ID NO: 804 - protein, 58 aa, synthetic construct
  REGION 1..58: note = Engineered IL-1R-I binding polypeptide
VDAKYAKELERAQMEIFGLPNLTRKQYTAFIRKLLDDPSQSSELLSEAKKLNDSQAPK

SEQ ID NO: 805 - protein, 58 aa, synthetic construct
  REGION 1..58: note = Engineered IL-1R-I binding polypeptide
VDAKYAKEVYAAYDEIYALPNLTRKQYTAFIRKLLDDPSQSSELLSEAKKLNDSQAPK

SEQ ID NO: 806 - protein, 58 aa, synthetic construct
  REGION 1..58: note = Engineered IL-1R-I binding polypeptide
VDAKYAKEAEFAQMEIFYLPNLTRRQYTAFIRKLLDDPSQSSELLSEAKKLNDSQAPK

SEQ ID NO: 807 - protein, 58 aa, synthetic construct
  REGION 1..58: note = Engineered IL-1R-I binding polypeptide
VDAKYAKEVQAAYYEIFALPNLTRKQYTAFIRKLLDDPSQSSELLSEAKKLNDSQAPK

SEQ ID NO: 808 - protein, 58 aa, synthetic construct
  REGION 1..58: note = Engineered IL-1R-I binding polypeptide
VDAKYAKEVYNAQMEIFYLPNLTRKQYTAFIRKLLDDPSQSSELLSEAKKLNDSQAPK

SEQ ID NO: 809 - protein, 58 aa, synthetic construct
  REGION 1..58: note = Engineered IL-1R-I binding polypeptide
VDAKYAKEAEIAQMEIYSLPNLTRKQYTAFIRKLLDDPSQSSELLSEAKKLNDSQAPK

SEQ ID NO: 810 - protein, 58 aa, synthetic construct
  REGION 1..58: note = Engineered IL-1R-I binding polypeptide
VDAKYAKEVEVAQMEIFDLPNLTRRQYTAFIRKLLDDPSQSSELLSEAKKLNDSQAPK

SEQ ID NO: 811 - protein, 58 aa, synthetic construct
  REGION 1..58: note = Engineered IL-1R-I binding polypeptide
VDAKYAKEVEQAQMEIYYLPNLTRKQYTAFIRKLFDDPSQSSELLSEAKKLNDSQAPK

SEQ ID NO: 812 - protein, 58 aa, synthetic construct
  REGION 1..58: note = Engineered IL-1R-I binding polypeptide
VDAKYAKEVENAQMEIFGLPNLTRKQYTAFIRKLLDDPSQSSELLSEAKKLNDSQAPK

SEQ ID NO: 813 - protein, 58 aa, synthetic construct
  REGION 1..58: note = Engineered IL-1R-I binding polypeptide
VDAKYAKEVEIAYIEIYKLPNLTRKQYTAFIRKLLDDPSQSSELLSEAKKLNDSQAPK

SEQ ID NO: 814 - protein, 58 aa, synthetic construct
  REGION 1..58: note = Engineered IL-1R-I binding polypeptide
VDAKYAKEVEVAQFEIFALPNLTRKQYTAFIRKLLDDPSQSSELLSEAKKLNDSQAPK

SEQ ID NO: 815 - protein, 58 aa, synthetic construct
  REGION 1..58: note = Engineered IL-1R-I binding polypeptide
VDAKYAKEIERAQMEIFYLPNLTRKQYTAFIRKLLDDPSQSSELLSEAKKLNDSQAPK

SEQ ID NO: 816 - protein, 58 aa, synthetic construct
  REGION 1..58: note = Engineered IL-1R-I binding polypeptide
VDAKYAKEIEDAQMEIFHLPNLTRKQYTAFIRKLLDDPSQSSELLSEAKKLNDSQAPK

SEQ ID NO: 817 - protein, 58 aa, synthetic construct
  REGION 1..58: note = Engineered IL-1R-I binding polypeptide
VDAKYAKEIENAQMEIFSLPNLTRKQYTAFIRKLLDDPSQSSELLSEAKKLNDSQAPK

SEQ ID NO: 818 - protein, 58 aa, synthetic construct
  REGION 1..58: note = Engineered IL-1R-I binding polypeptide
VDAKYAKELEAAQMEIFGLPNLTRKQYTAFIRKLLDDPSQSSELLSEAKKLNDSQAPK

SEQ ID NO: 819 - protein, 58 aa, synthetic construct
  REGION 1..58: note = Engineered IL-1R-I binding polypeptide
VDAKYAKEIERAQLEIFALPNLTRKQYTAFIRKLFDDPSQSSELLSEAKKLNDSQAPK

SEQ ID NO: 820 - protein, 58 aa, synthetic construct
  REGION 1..58: note = Engineered IL-1R-I binding polypeptide
VDAKYAKETYRAQMEIFALPNLTRRQYTAFIRKLLDDPSQSSELLSEAKKLNDSQAPK

SEQ ID NO: 821 - protein, 58 aa, synthetic construct
  REGION 1..58: note = Engineered IL-1R-I binding polypeptide
VDAKYAKEVEEAQMEIYSLPNLTRRQYTAFIRKLLDDPSQSSELLSEAKKLNDSQAPK

SEQ ID NO: 822 - protein, 58 aa, synthetic construct
  REGION 1..58: note = Engineered IL-1R-I binding polypeptide
VDAKYAKEVEKAQMEIFALPNLTRKQYTAFIRKLLDDPSQSSELLSEAKKLNDSQAPK

SEQ ID NO: 823 - protein, 58 aa, synthetic construct
  REGION 1..58: note = Engineered IL-1R-I binding polypeptide
VDAKYAKEAHAAYFEIYRLPNLTRKQYTAFIRKLLDDPSQSSELLSEAKKLNDSQAPK

SEQ ID NO: 824 - protein, 58 aa, synthetic construct
  REGION 1..58: note = Engineered IL-1R-I binding polypeptide
VDAKYAKEIERAQMEIYYLPNLTRKQYTAFIRKLLDDPSQSSELLSEAKKLNDSQAPK

SEQ ID NO: 825 - protein, 58 aa, synthetic construct
  REGION 1..58: note = Engineered IL-1R-I binding polypeptide
VDAKYAKELEAAQMEIFNLPNLTRKQYTAFIRKLLDDPSQSSELLSEAKKLNDSQAPK

SEQ ID NO: 826 - protein, 58 aa, synthetic construct
  REGION 1..58: note = Engineered IL-1R-I binding polypeptide
VDAKYAKEVEVAQMEIFALPNLTRKQYTAFIRKLFDDPSQSSELLSEAKKLNDSQAPK

SEQ ID NO: 827 - protein, 58 aa, synthetic construct
  REGION 1..58: note = Engineered IL-1R-I binding polypeptide
VDAKYAKEAEWAYMEIFKLPNLTRKQYTAFIRKLLDDPSQSSELLSEAKKLNDSQAPK

SEQ ID NO: 828 - protein, 58 aa, synthetic construct
  REGION 1..58: note = Engineered IL-1R-I binding polypeptide
VDAKYAKETEYAQLEIFALPNLTRKQYTAFIRKLLDDPSQSSELLSEAKKLNDSQAPK

SEQ ID NO: 829 - protein, 58 aa, synthetic construct
  REGION 1..58: note = Engineered IL-1R-I binding polypeptide
VDAKYAKEVEDAQMEIFRLPNLTRKQYTAFIRKLLDDPSQSSELLSEAKKLNDSQAPK

SEQ ID NO: 830 - protein, 58 aa, synthetic construct
  REGION 1..58: note = Engineered IL-1R-I binding polypeptide
VDAKYAKEIEEAQMEIFGLPNLTRKQYTAFIRKLFDDPSQSSELLSEAKKLNDSQAPK

SEQ ID NO: 831 - protein, 58 aa, synthetic construct
  REGION 1..58: note = Engineered IL-1R-I binding polypeptide
VDAKYAKEVERAQMEIFALPNLTRKQYTAFIRKLFDDPSQSSELLSEAKKLNDSQAPK

SEQ ID NO: 832 - protein, 58 aa, synthetic construct
  REGION 1..58: note = Engineered IL-1R-I binding polypeptide
VDAKYAKEAEAAYYEIYALPNLTRKQYTAFIRKLLDDPSQSSELLSEAKKLNDSQAPK

SEQ ID NO: 833 - protein, 58 aa, synthetic construct
  REGION 1..58: note = Engineered IL-1R-I binding polypeptide
VDAKYAKETEEAQMEIYRLPNLTRRQYTAFIRKLFDDPSQSSELLSEAKKLNDSQAPK

SEQ ID NO: 834 - protein, 58 aa, synthetic construct
  REGION 1..58: note = Engineered IL-1R-I binding polypeptide
VDAKYAKETEDAYFEIYRLPNLTRKQYTAFIRKLLDDPSQSSELLSEAKKLNDSQAPK

SEQ ID NO: 835 - protein, 58 aa, synthetic construct
  REGION 1..58: note = Engineered IL-1R-I binding polypeptide
VDAKYAKEIKQAQMEIYSLPNLTRKQYTAFIRKLFDDPSQSSELLSEAKKLNDSQAPK

SEQ ID NO: 836 - protein, 58 aa, synthetic construct
  REGION 1..58: note = Engineered IL-1R-I binding polypeptide
VDAKYAKEVEEAQMEIYNLPNLTRRQYTAFIRKLLDDPSQSSELLSEAKKLNDSQAPK

SEQ ID NO: 837 - protein, 58 aa, synthetic construct
  REGION 1..58: note = Engineered IL-1R-I binding polypeptide
VDAKYAKETEQAQMEIFGLPNLTRRQYTAFIRKLLDDPSQSSELLSEAKKLNDSQAPK

SEQ ID NO: 838 - protein, 58 aa, synthetic construct
  REGION 1..58: note = Engineered IL-1R-I binding polypeptide
VDAKYAKEIEDAQMEIYYLPNLTRKQYTAFIRKLFDDPSQSSELLSEAKKLNDSQAPK

SEQ ID NO: 839 - protein, 58 aa, synthetic construct
  REGION 1..58: note = Engineered IL-1R-I binding polypeptide
VDAKYAKESEQAYWEIYALPNLTRKQYTAFIRKLLDDPSQSSELLSEAKKLNDSQAPK

SEQ ID NO: 840 - protein, 58 aa, synthetic construct
  REGION 1..58: note = Engineered IL-1R-I binding polypeptide
VDAKYAKEVEVAQMEIYDLPNLTRKQYTAFIRKLLDDPSQSSELLSEAKKLNDSQAPK

SEQ ID NO: 841 - protein, 58 aa, synthetic construct
  REGION 1..58: note = Engineered IL-1R-I binding polypeptide
VDAKYAKEIERAQMEIFGLPNLTRKQYTAFIRKLLDDPSQSSELLSEAKKLNDSQAPK

SEQ ID NO: 842 - protein, 58 aa, synthetic construct
  REGION 1..58: note = Engineered IL-1R-I binding polypeptide
VDAKYAKEAEQAQMEIFGLPNLTRKQYTAFIRKLFDDPSQSSELLSEAKKLNDSQAPK

SEQ ID NO: 843 - protein, 58 aa, synthetic construct
  REGION 1..58: note = Engineered IL-1R-I binding polypeptide
VDAKYAKELEYAYFEIYNLPNLTRKQYTAFIRKLLDDPSQSSELLSEAKKLNDSQAPK

SEQ ID NO: 844 - protein, 58 aa, synthetic construct
  REGION 1..58: note = Engineered IL-1R-I binding polypeptide
VDAKYAKEVEFAQMEIFALPNLTRKQYTAFIRKLLDDPSQSSELLSEAKKLNDSQAPK

SEQ ID NO: 845 - protein, 58 aa, synthetic construct
  REGION 1..58: note = Engineered IL-1R-I binding polypeptide
VDAKYAKETEEAQMEIYNLPNLTRKQYTAFIRKLLDDPSQSSELLSEAKKLNDSQAPK

SEQ ID NO: 846 - protein, 58 aa, synthetic construct
  REGION 1..58: note = Engineered IL-1R-I binding polypeptide
VDAKYAKETYNAQMEIFALPNLTRKQYTAFIRKLLDDPSQSSELLSEAKKLNDSQAPK

SEQ ID NO: 847 - protein, 58 aa, synthetic construct
  REGION 1..58: note = Engineered IL-1R-I binding polypeptide
VDAKYAKEISVAQFEIYHLPNLTRKQYTAFIRKLFDDPSQSSELLSEAKKLNDSQAPK

SEQ ID NO: 848 - protein, 58 aa, synthetic construct
  REGION 1..58: note = Engineered IL-1R-I binding polypeptide
VDAKYAKEIKAAQMEIFELPNLTRKQYTAFIRKLLDDPSQSSELLSEAKKLNDSQAPK

SEQ ID NO: 849 - protein, 58 aa, synthetic construct
  REGION 1..58: note = Engineered IL-1R-I binding polypeptide
VDAKYAKEVEYAYQEIYALPNLTRKQYTAFIRKLLDDPSQSSELLSEAKKLNDSQAPK

SEQ ID NO: 850 - protein, 58 aa, synthetic construct
  REGION 1..58: note = Engineered IL-1R-I binding polypeptide
VDAKYAKEVEIAQMEIFELPNLTRKQYTAFIRKLFDDPSQSSELLSEAKKLNDSQAPK

SEQ ID NO: 851 - protein, 58 aa, synthetic construct
  REGION 1..58: note = Engineered IL-1R-I binding polypeptide
VDAKYAKEIDDAYLEIYALPNLTRKQYTAFIRKLLDDPSQSSELLSEAKKLNDSQAPK

SEQ ID NO: 852 - protein, 58 aa, synthetic construct
  REGION 1..58: note = Engineered IL-1R-I binding polypeptide
VDAKYAKEAYIAQQEIFALPNLTRKQYTAFIRKLLDDPSQSSELLSEAKKLNDSQAPK

SEQ ID NO: 853 - protein, 58 aa, synthetic construct
  REGION 1..58: note = Engineered IL-1R-I binding polypeptide
VDAKYAKEVEVAYFEIYALPNLTRKQYTAFIRKLLDDPSQSSELLSEAKKLNDSQAPK

SEQ ID NO: 854 - protein, 58 aa, synthetic construct
  REGION 1..58: note = Engineered IL-1R-I binding polypeptide
VDAKYAKEVVTAQMEIFFLPNLTRKQYTAFIRKLLDDPSQSSELLSEAKKLNDSQAPK

SEQ ID NO: 855 - protein, 58 aa, synthetic construct
  REGION 1..58: note = Engineered IL-1R-I binding polypeptide
VDAKYAKEVVIAQHEIFSLPNLTRRQYTAFIRKLLDDPSQSSELLSEAKKLNDSQAPK

SEQ ID NO: 856 - protein, 58 aa, synthetic construct
  REGION 1..58: note = Engineered IL-1R-I binding polypeptide
VDAKYAKEVEYAYYEIFKLPNLTRKQYTAFIRKLLDDPSQSSELLSEAKKLNDSQAPK

SEQ ID NO: 857 - protein, 58 aa, synthetic construct
  REGION 1..58: note = Engineered IL-1R-I binding polypeptide
VDAKYAKEAEAAQMEIFKLPNLTRKQYTAFIRKLLDDPSQSSELLSEAKKLNDSQAPK

SEQ ID NO: 858 - protein, 58 aa, synthetic construct
  REGION 1..58: note = Engineered IL-1R-I binding polypeptide
VDAKYAKELEKAYYEIYELPNLTRRQYTAFIRKLLDDPSQSSELLSEAKKLNDSQAPK

SEQ ID NO: 859 - protein, 58 aa, synthetic construct
  REGION 1..58: note = Engineered IL-1R-I binding polypeptide
VDAKYAKETHNAYQEIYQLPNLTRKQYTAFIRKLLDDPSQSSELLSEAKKLNDSQAPK

SEQ ID NO: 860 - protein, 58 aa, synthetic construct
  REGION 1..58: note = Engineered IL-1R-I binding polypeptide
VDAKYAKEVIEAYEEIFALPNLTRKQYTAFIRKLLDDPSQSSELLSEAKKLNDSQAPK

SEQ ID NO: 861 - protein, 58 aa, synthetic construct
  REGION 1..58: note = Engineered IL-1R-I binding polypeptide
VDAKYAKEVEAAYFEIFQLPNLTRKQYTAFIRKLLDDPSQSSELLSEAKKLNDSQAPK

SEQ ID NO: 862 - protein, 58 aa, synthetic construct
  REGION 1..58: note = Engineered IL-1R-I binding polypeptide
VDAKYAKEAEDAYHEIFSLPNLTRKQYTAFIRKLLDDPSQSSELLSEAKKLNDSQAPK

SEQ ID NO: 863 - protein, 58 aa, synthetic construct
  REGION 1..58: note = Engineered IL-1R-I binding polypeptide
VDAKYAKEVKDAQFEIFALPNLTRKQYTAFIRKLFDDPSQSSELLSEAKKLNDSQAPK

SEQ ID NO: 864 - protein, 58 aa, synthetic construct
  REGION 1..58: note = Engineered IL-1R-I binding polypeptide
VDAKYAKEADFAYWEIYALPNLTRKQYTAFIRKLLDDPSQSSELLSEAKKLNDSQAPK

SEQ ID NO: 865 - protein, 58 aa, synthetic construct
  REGION 1..58: note = Engineered IL-1R-I binding polypeptide
VDAKYAKEVQDAQMEIYYLPNLTRKQYTAFIRKLLDDPSQSSELLSEAKKLNDSQAPK

SEQ ID NO: 866 - protein, 58 aa, synthetic construct
  REGION 1..58: note = Engineered IL-1R-I binding polypeptide
VDAKYAKEAVQAYHEIFALPNLTRKQYTAFIRKLLDDPSQSSELLSEAKKLNDSQAPK

SEQ ID NO: 867 - protein, 58 aa, synthetic construct
  REGION 1..58: note = Engineered IL-1R-I binding polypeptide
VDAKYAKEATEAYDEIYLLPNLTRKQYTAFIRKLLDDPSQSSELLSEAKKLNDSQAPK

SEQ ID NO: 868 - protein, 58 aa, synthetic construct
  REGION 1..58: note = Engineered IL-1R-I binding polypeptide
VDAKYAKEATEAYMEIYSLPNLTRKQYTAFIRKLLDDPSQSSELLSEAKKLNDSQAPK

SEQ ID NO: 869 - protein, 58 aa, synthetic construct
  REGION 1..58: note = Engineered IL-1R-I binding polypeptide
VDAKYAKETESAYFEIYNLPNLTRKQYTAFIRKLLDDPSQSSELLSEAKKLNDSQAPK

SEQ ID NO: 870 - protein, 58 aa, synthetic construct
  REGION 1..58: note = Engineered IL-1R-I binding polypeptide
VDAKYAKEAEKAYMEIFGLPNLTRKQYTAFIRKLLDDPSQSSELLSEAKKLNDSQAPK

SEQ ID NO: 871 - protein, 58 aa, synthetic construct
  REGION 1..58: note = Engineered IL-1R-I binding polypeptide
VDAKYAKEVETAQMEIFSLPNLTRRQYTAFIRKLLDDPSQSSELLSEAKKLNDSQAPK

SEQ ID NO: 872 - protein, 58 aa, synthetic construct
  REGION 1..58: note = Engineered IL-1R-I binding polypeptide
VDAKYAKELYSAQMEIYGLPNLTRKQYTAFIRKLFDDPSQSSELLSEAKKLNDSQAPK

SEQ ID NO: 873 - protein, 58 aa, synthetic construct
  REGION 1..58: note = Engineered IL-1R-I binding polypeptide
VDAKYAKEAEEAYMEIFRLPNLTRKQYTAFIRKLLDDPSQSSELLSEAKKLNDSQAPK

SEQ ID NO: 874 - protein, 58 aa, synthetic construct
  REGION 1..58: note = Engineered IL-1R-I binding polypeptide
VDAKYAKEAQEAYDEIYGLPNLTRKQYTAFIRKLLDDPSQSSELLSEAKKLNDSQAPK

SEQ ID NO: 875 - protein, 58 aa, synthetic construct
  REGION 1..58: note = Engineered IL-1R-I binding polypeptide
VDAKYAKEHVEAYYEIYNLPNLTRRQYTAFIRKLLDDPSQSSELLSEAKKLNDSQAPK

SEQ ID NO: 876 - protein, 58 aa, synthetic construct
  REGION 1..58: note = Engineered IL-1R-I binding polypeptide
VDAKYAKETEQAQMEIFKLPNLTRKQYTAFIRKLLDDPSQSSELLSEAKKLNDSQAPK

SEQ ID NO: 877 - protein, 58 aa, synthetic construct
  REGION 1..58: note = Engineered IL-1R-I binding polypeptide
VDAKYAKEVEQAQMEIYNLPNLTRKQYTAFIRKLLDDPSQSSELLSEAKKLNDSQAPK

SEQ ID NO: 878 - protein, 58 aa, synthetic construct
  REGION 1..58: note = Engineered IL-1R-I binding polypeptide
VDAKYAKEATSAYFEIYALPNLTRRQYTAFIRKLLDDPSQSSELLSEAKKLNDSQAPK

SEQ ID NO: 879 - protein, 58 aa, synthetic construct
  REGION 1..58: note = Engineered IL-1R-I binding polypeptide
VDAKYAKELEAAQMEIFSLPNLTRKQYTAFIRKLLDDPSQSSELLSEAKKLNDSQAPK

SEQ ID NO: 880 - protein, 58 aa, synthetic construct
  REGION 1..58: note = Engineered IL-1R-I binding polypeptide
VDAKYAKEAEDAYMEIYRLPNLTRKQYTAFIRKLLDDPSQSSELLSEAKKLNDSQAPK

SEQ ID NO: 881 - protein, 58 aa, synthetic construct
  REGION 1..58: note = Engineered IL-1R-I binding polypeptide
VDAKYAKEAESAYMEIFRLPNLTRKQYTAFIRKLLDDPSQSSELLSEAKKLNDSQAPK

SEQ ID NO: 882 - protein, 58 aa, synthetic construct
  REGION 1..58: note = Engineered IL-1R-I binding polypeptide
VDAKYAKELEAAYFEIYYLPNLTRKQYTAFIRKLLDDPSQSSELLSEAKKLNDSQAPK

SEQ ID NO: 883 - protein, 58 aa, synthetic construct
  REGION 1..58: note = Engineered IL-1R-I binding polypeptide
VDAKYAKEAEYAYFEIYNLPNLTRKQYTAFIRKLLDDPSQSSELLSEAKKLNDSQAPK

SEQ ID NO: 884 - protein, 58 aa, synthetic construct
  REGION 1..58: note = Engineered IL-1R-I binding polypeptide
VDAKYAKETHSAQMEIFNLPNLTRKQYTAFIRKLLDDPSQSSELLSEAKKLNDSQAPK

SEQ ID NO: 885 - protein, 58 aa, synthetic construct
  REGION 1..58: note = Engineered IL-1R-I binding polypeptide
VDAKYAKETERAQMEIFDLPNLTRKQYTAFIRKLLDDPSQSSELLSEAKKLNDSQAPK

SEQ ID NO: 886 - protein, 58 aa, synthetic construct
  REGION 1..58: note = Engineered IL-1R-I binding polypeptide
VDAKYAKEAYSAQMEIFSLPNLTRKQYTAFIRKLLDDPSQSSELLSEAKKLNDSQAPK

SEQ ID NO: 887 - protein, 58 aa, synthetic construct
  REGION 1..58: note = Engineered IL-1R-I binding polypeptide
VDAKYAKEIEDAQMEIFGLPNLTRKQYTAFIRKLFDDPSQSSELLSEAKKLNDSQAPK

SEQ ID NO: 888 - protein, 58 aa, synthetic construct
  REGION 1..58: note = Engineered IL-1R-I binding polypeptide
VDAKYAKEVYSAQLEIFSLPNLTRKQYTAFIRKLFDDPSQSSELLSEAKKLNDSQAPK

SEQ ID NO: 889 - protein, 58 aa, synthetic construct
  REGION 1..58: note = Engineered IL-1R-I binding polypeptide
VDAKYAKEVEQAYYEIFYLPNLTRKQYTAFIRKLLDDPSQSSELLSEAKKLNDSQAPK

SEQ ID NO: 890 - protein, 58 aa, synthetic construct
  REGION 1..58: note = Engineered IL-1R-I binding polypeptide
VDAKYAKEIEEAYMEIFQLPNLTRKQYTAFIRKLLDDPSQSSELLSEAKKLNDSQAPK

SEQ ID NO: 891 - protein, 58 aa, synthetic construct
  REGION 1..58: note = Engineered IL-1R-I binding polypeptide
VDAKYAKEIEKAQMEIFALPNLTRKQYTAFIRKLFDDPSQSSELLSEAKKLNDSQAPK

SEQ ID NO: 892 - protein, 58 aa, synthetic construct
  REGION 1..58: note = Engineered IL-1R-I binding polypeptide
VDAKYAKEAVVAYSEIYGLPNLTRKQYTAFIRKLLDDPSQSSELLSEAKKLNDSQAPK

SEQ ID NO: 893 - protein, 58 aa, synthetic construct
  REGION 1..58: note = Engineered IL-1R-I binding polypeptide
VDAKYAKEIEVAYSEIYNLPNLTRKQYTAFIRKLLDDPSQSSELLSEAKKLNDSQAPK

SEQ ID NO: 894 - protein, 58 aa, synthetic construct
  REGION 1..58: note = Engineered IL-1R-I binding polypeptide
VDAKYAKEVDEAYMEIYELPNLTRRQYTAFIRKLLDDPSQSSELLSEAKKLNDSQAPK

SEQ ID NO: 895 - protein, 58 aa, synthetic construct
  REGION 1..58: note = Engineered IL-1R-I binding polypeptide
VDAKYAKEIEHAQMEIFYLPNLTRKQYTAFIRKLFDDPSQSSELLSEAKKLNDSQAPK

SEQ ID NO: 896 - protein, 58 aa, synthetic construct
  REGION 1..58: note = Engineered IL-1R-I binding polypeptide
VDAKYAKELSDAYFEIYALPNLTRKQYTAFIRKLLDDPSQSSELLSEAKKLNDSQAPK

SEQ ID NO: 897 - protein, 58 aa, synthetic construct
  REGION 1..58: note = Engineered IL-1R-I binding polypeptide
VDAKYAKEVEEAQMEIFVLPNLTRKQYTAFIRKLLDDPSQSSELLSEAKKLNDSQAPK

SEQ ID NO: 898 - protein, 58 aa, synthetic construct
  REGION 1..58: note = Engineered IL-1R-I binding polypeptide
VDAKYAKELEEAYMEIYHLPNLTRKQYTAFIRKLLDDPSQSSELLSEAKKLNDSQAPK

SEQ ID NO: 899 - protein, 58 aa, synthetic construct
  REGION 1..58: note = Engineered IL-1R-I binding polypeptide
VDAKYAKEVELAYFEIFRLPNLTRKQYTAFIRKLLDDPSQSSELLSEAKKLNDSQAPK

SEQ ID NO: 900 - protein, 58 aa, synthetic construct
  REGION 1..58: note = Engineered IL-1R-I binding polypeptide
VDAKYAKETVSAYWEIFELPNLTRKQYTAFIRKLLDDPSQSSELLSEAKKLNDSQAPK

SEQ ID NO: 901 - protein, 58 aa, synthetic construct
  REGION 1..58: note = Engineered IL-1R-I binding polypeptide
VDAKYAKEIKEAQMEIYYLPNLTRKQYTAFIRKLLDDPSQSSELLSEAKKLNDSQAPK

SEQ ID NO: 902 - protein, 58 aa, synthetic construct
  REGION 1..58: note = Engineered IL-1R-I binding polypeptide
VDAKYAKELEEAQMEIFKLPNLTRKQYTAFIRKLLDDPSQSSELLSEAKKLNDSQAPK

SEQ ID NO: 903 - protein, 58 aa, synthetic construct
  REGION 1..58: note = Engineered IL-1R-I binding polypeptide
VDAKYAKEIEDAYMEIYRLPNLTRKQYTAFIRKLLDDPSQSSELLSEAKKLNDSQAPK

SEQ ID NO: 904 - protein, 58 aa, synthetic construct
  REGION 1..58: note = Engineered IL-1R-I binding polypeptide
VDAKYAKEVEIAYFEIYNLPNLTRKQYTAFIRKLLDDPSQSSELLSEAKKLNDSQAPK

SEQ ID NO: 905 - protein, 58 aa, synthetic construct
  REGION 1..58: note = Engineered IL-1R-I binding polypeptide
VDAKYAKEAESAYWEIYALPNLTRKQYTAFIRKLLDDPSQSSELLSEAKKLNDSQAPK

SEQ ID NO: 906 - protein, 58 aa, synthetic construct
  REGION 1..58: note = Engineered IL-1R-I binding polypeptide
VDAKYAKEVEAAYMEIYHLPNLTRKQYTAFIRKLLDDPSQSSELLSEAKKLNDSQAPK

SEQ ID NO: 907 - protein, 58 aa, synthetic construct
  REGION 1..58: note = Engineered IL-1R-I binding polypeptide
VDAKYAKEAVDAYWEIYGLPNLTRKQYTAFIRKLLDDPSQSSELLSEAKKLNDSQAPK

SEQ ID NO: 908 - protein, 58 aa, synthetic construct
  REGION 1..58: note = Engineered IL-1R-I binding polypeptide
VDAKYAKEVEIAYFEIYALPNLTRKQYTAFIRKLLDDPSQSSELLSEAKKLNDSQAPK

SEQ ID NO: 909 - protein, 58 aa, synthetic construct
  REGION 1..58: note = Engineered IL-1R-I binding polypeptide
VDAKYAKEVINAYFEIYHLPNLTRKQYTAFIRKLLDDPSQSSELLSEAKKLNDSQAPK

SEQ ID NO: 910 - protein, 58 aa, synthetic construct
  REGION 1..58: note = Engineered IL-1R-I binding polypeptide
VDAKYAKEVEEAYMEIFQLPNLTRKQYTAFIRKLLDDPSQSSELLSEAKKLNDSQAPK

SEQ ID NO: 911 - protein, 58 aa, synthetic construct
  REGION 1..58: note = Engineered IL-1R-I binding polypeptide
VDAKYAKEVEAAYFEIYDLPNLTRKQYTAFIRKLLDDPSQSSELLSEAKKLNDSQAPK

SEQ ID NO: 912 - protein, 58 aa, synthetic construct
  REGION 1..58: note = Engineered IL-1R-I binding polypeptide
VDAKYAKEVEDAYFEIYHLPNLTRKQYTAFIRKLLDDPSQSSELLSEAKKLNDSQAPK

SEQ ID NO: 913 - protein, 58 aa, synthetic construct
  REGION 1..58: note = Engineered IL-1R-I binding polypeptide
VDAKYAKEIEDAYMEIYYLPNLTRKQYTAFIRKLLDDPSQSSELLSEAKKLNDSQAPK

SEQ ID NO: 914 - protein, 58 aa, synthetic construct
  REGION 1..58: note = Engineered IL-1R-I binding polypeptide
VDAKYAKEVEDAQMEIFNLPNLTRKQYTAFIRKLLDDPSQSSELLSEAKKLNDSQAPK

SEQ ID NO: 915 - protein, 58 aa, synthetic construct
  REGION 1..58: note = Engineered IL-1R-I binding polypeptide
VDAKYAKEVEDAYMEIFHLPNLTRKQYTAFIRKLLDDPSQSSELLSEAKKLNDSQAPK

SEQ ID NO: 916 - protein, 58 aa, synthetic construct
  REGION 1..58: note = Engineered IL-1R-I binding polypeptide
VDAKYAKEQESAYWEIYALPNLTRKQYTAFIRKLLDDPSQSSELLSEAKKLNDSQAPK

SEQ ID NO: 917 - protein, 58 aa, synthetic construct
  REGION 1..58: note = Engineered IL-1R-I binding polypeptide
VDAKYAKETEEAYQEIYQLPNLTRKQYTAFIRKLLDDPSQSSELLSEAKKLNDSQAPK

SEQ ID NO: 918 - protein, 58 aa, synthetic construct
  REGION 1..58: note = Engineered IL-1R-I binding polypeptide
VDAKYAKEELEAYWEIFALPNLTRKQYTAFIRKLLDDPSQSSELLSEAKKLNDSQAPK

SEQ ID NO: 919 - protein, 58 aa, synthetic construct
  REGION 1..58: note = Engineered IL-1R-I binding polypeptide
VDAKYAKEVQDAYWEIYALPNLTRKQYTAFIRKLLDDPSQSSELLSEAKKLNDSQAPK

SEQ ID NO: 920 - protein, 58 aa, synthetic construct
  REGION 1..58: note = Engineered IL-1R-I binding polypeptide
VDAKYAKEVENAYFEIFALPNLTRKQYTAFIRKLLDDPSQSSELLSEAKKLNDSQAPK

SEQ ID NO: 921 - protein, 58 aa, synthetic construct
  REGION 1..58: note = Engineered IL-1R-I binding polypeptide
VDAKYAKEVEAAYYEIYGLPNLTRKQYTAFIRKLLDDPSQSSELLSEAKKLNDSQAPK

SEQ ID NO: 922 - protein, 58 aa, synthetic construct
  REGION 1..58: note = Engineered IL-1R-I binding polypeptide
VDAKYAKEVEHAYFEIYHLPNLTRKQYTAFIRKLLDDPSQSSELLSEAKKLNDSQAPK

SEQ ID NO: 923 - protein, 58 aa, synthetic construct
  REGION 1..58: note = Engineered IL-1R-I binding polypeptide
VDAKYAKEVHEAYMEIFELPNLTRKQYTAFIRKLLDDPSQSSELLSEAKKLNDSQAPK

SEQ ID NO: 924 - protein, 58 aa, synthetic construct
  REGION 1..58: note = Engineered IL-1R-I binding polypeptide
VDAKYAKEVEQAYMEIYALPNLTRKQYTAFIRKLLDDPSQSSELLSEAKKLNDSQAPK

SEQ ID NO: 925 - protein, 58 aa, synthetic construct
  REGION 1..58: note = Engineered IL-1R-I binding polypeptide
VDAKYAKEVVDAYYEIYDLPNLTRKQYTAFIRKLLDDPSQSSELLSEAKKLNDSQAPK

SEQ ID NO: 926 - protein, 58 aa, synthetic construct
  REGION 1..58: note = Engineered IL-1R-I binding polypeptide
VDAKYAKEAQIAYFEIYSLPNLTRKQYTAFIRKLLDDPSQSSELLSEAKKLNDSQAPK

SEQ ID NO: 927 - protein, 58 aa, synthetic construct
  REGION 1..58: note = Engineered IL-1R-I binding polypeptide
VDAKYAKEVEFAYYEIYRLPNLTRKQYTAFIRKLLDDPSQSSELLSEAKKLNDSQAPK

SEQ ID NO: 928 - protein, 58 aa, synthetic construct
  REGION 1..58: note = Engineered IL-1R-I binding polypeptide
VDAKYAKEVVEAYYEIYDLPNLTRKQYTAFIRKLLDDPSQSSELLSEAKKLNDSQAPK

SEQ ID NO: 929 - protein, 58 aa, synthetic construct
  REGION 1..58: note = Engineered IL-1R-I binding polypeptide
VDAKYAKEIEEAYMEIYELPNLTRKQYTAFIRKLLDDPSQSSELLSEAKKLNDSQAPK

SEQ ID NO: 930 - protein, 58 aa, synthetic construct
  REGION 1..58: note = Engineered IL-1R-I binding polypeptide
VDAKYAKEVQTAYMEIYHLPNLTRKQYTAFIRKLLDDPSQSSELLSEAKKLNDSQAPK

SEQ ID NO: 931 - protein, 58 aa, synthetic construct
  REGION 1..58: note = Engineered IL-1R-I binding polypeptide
VDAKYAKEAEYAYFEIYKLPNLTRKQYTAFIRKLLDDPSQSSELLSEAKKLNDSQAPK

SEQ ID NO: 932 - protein, 58 aa, synthetic construct
  REGION 1..58: note = Engineered IL-1R-I binding polypeptide
VDAKYAKEAYIAQMEIFELPNLTRKQYTAFIRKLLDDPSQSSELLSEAKKLNDSQAPK

SEQ ID NO: 933 - protein, 58 aa, synthetic construct
  REGION 1..58: note = Engineered IL-1R-I binding polypeptide
VDAKYAKEAERAYWEIYELPNLTRKQYTAFIRKLLDDPSQSSELLSEAKKLNDSQAPK

SEQ ID NO: 934 - protein, 58 aa, synthetic construct
  REGION 1..58: note = Engineered IL-1R-I binding polypeptide
VDAKYAKETHDAYYEIYGLPNLTRKQYTAFIRKLLDDPSQSSELLSEAKKLNDSQAPK

SEQ ID NO: 935 - protein, 58 aa, synthetic construct
  REGION 1..58: note = Engineered IL-1R-I binding polypeptide
VDAKYAKELEDAYYEIFGLPNLTRKQYTAFIRKLLDDPSQSSELLSEAKKLNDSQAPK

SEQ ID NO: 936 - protein, 58 aa, synthetic construct
  REGION 1..58: note = Engineered IL-1R-I binding polypeptide
VDAKYAKEVEDAYQEIFQLPNLTRKQYTAFIRKLLDDPSQSSELLSEAKKLNDSQAPK

SEQ ID NO: 937 - protein, 58 aa, synthetic construct
  REGION 1..58: note = Engineered IL-1R-I binding polypeptide
VDAKYAKEAHNAYYEIYALPNLTRKQYTAFIRKLLDDPSQSSELLSEAKKLNDSQAPK

SEQ ID NO: 938 - protein, 58 aa, synthetic construct
  REGION 1..58: note = Engineered IL-1R-I binding polypeptide
VDAKYAKEVEDAYFEIYWLPNLTRKQYTAFIRKLLDDPSQSSELLSEAKKLNDSQAPK

SEQ ID NO: 939 - protein, 58 aa, synthetic construct
  REGION 1..58: note = Engineered IL-1R-I binding polypeptide
VDAKYAKEVTEAYFEIYRLPNLTRKQYTAFIRKLLDDPSQSSELLSEAKKLNDSQAPK

SEQ ID NO: 940 - protein, 58 aa, synthetic construct
  REGION 1..58: note = Engineered IL-1R-I binding polypeptide
VDAKYAKEVEKAYEEIYKLPNLTRKQYTAFIRKLLDDPSQSSELLSEAKKLNDSQAPK

SEQ ID NO: 941 - protein, 58 aa, synthetic construct
  REGION 1..58: note = Engineered IL-1R-I binding polypeptide
VDAKYAKEVDYAYFEIYKLPNLTRKQYTAFIRKLLDDPSQSSELLSEAKKLNDSQAPK

SEQ ID NO: 942 - protein, 58 aa, synthetic construct
  REGION 1..58: note = Engineered IL-1R-I binding polypeptide
VDAKYAKETEAAYFEIFHLPNLTRKQYTAFIRKLLDDPSQSSELLSEAKKLNDSQAPK

SEQ ID NO: 943 - protein, 58 aa, synthetic construct
  REGION 1..58: note = Engineered IL-1R-I binding polypeptide
VDAKYAKEVEVAYMEIFQLPNLTRKQYTAFIRKLLDDPSQSSELLSEAKKLNDSQAPK

SEQ ID NO: 944 - protein, 58 aa, synthetic construct
  REGION 1..58: note = Engineered IL-1R-I binding polypeptide
VDAKYAKEVEQAYMEIFGLPNLTRKQYTAFIRKLLDDPSQSSELLSEAKKLNDSQAPK

SEQ ID NO: 945 - protein, 58 aa, synthetic construct
  REGION 1..58: note = Engineered IL-1R-I binding polypeptide
VDAKYAKEVEYAYFEIYGLPNLTRKQYTAFIRKLLDDPSQSSELLSEAKKLNDSQAPK

SEQ ID NO: 946 - protein, 58 aa, synthetic construct
  REGION 1..58: note = Engineered IL-1R-I binding polypeptide
VDAKYAKEAEVAYWEIYALPNLTRKQYTAFIRKLLDDPSQSSELLSEAKKLNDSQAPK

SEQ ID NO: 947 - protein, 58 aa, synthetic construct
  REGION 1..58: note = Engineered IL-1R-I binding polypeptide
VDAKYAKEVEIAYYEIYRLPNLTRKQYTAFIRKLLDDPSQSSELLSEAKKLNDSQAPK

SEQ ID NO: 948 - protein, 58 aa, synthetic construct
  REGION 1..58: note = Engineered IL-1R-I binding polypeptide
VDAKYAKEVIQAYFEIYELPNLTRKQYTAFIRKLLDDPSQSSELLSEAKKLNDSQAPK

SEQ ID NO: 949 - protein, 58 aa, synthetic construct
  REGION 1..58: note = Engineered IL-1R-I binding polypeptide
VDAKYAKEAEDAYWEIFKLPNLTRKQYTAFIRKLLDDPSQSSELLSEAKKLNDSQAPK

SEQ ID NO: 950 - protein, 58 aa, synthetic construct
  REGION 1..58: note = Engineered IL-1R-I binding polypeptide
VDAKYAKEVTEAYFEIYALPNLTRKQYTAFIRKLLDDPSQSSELLSEAKKLNDSQAPK

SEQ ID NO: 951 - protein, 58 aa, synthetic construct
  REGION 1..58: note = Engineered IL-1R-I binding polypeptide
VDAKYAKEVEEAYFEIYRLPNLTRKQYTAFIRKLLDDPSQSSELLSEAKKLNDSQAPK

SEQ ID NO: 952 - protein, 58 aa, synthetic construct
  REGION 1..58: note = Engineered IL-1R-I binding polypeptide
VDAKYAKEVQEAYFEIFGLPNLTRKQYTAFIRKLLDDPSQSSELLSEAKKLNDSQAPK

SEQ ID NO: 953 - protein, 58 aa, synthetic construct
  REGION 1..58: note = Engineered IL-1R-I binding polypeptide
VDAKYAKEVVEAYEEIYALPNLTRKQYTAFIRKLLDDPSQSSELLSEAKKLNDSQAPK

SEQ ID NO: 954 - protein, 58 aa, synthetic construct
  REGION 1..58: note = Engineered IL-1R-I binding polypeptide
VDAKYAKEVQVAYFEIFALPNLTRKQYTAFIRKLLDDPSQSSELLSEAKKLNDSQAPK

SEQ ID NO: 955 - protein, 58 aa, synthetic construct
  REGION 1..58: note = Engineered IL-1R-I binding polypeptide
VDAKYAKEVEDAYIEIYELPNLTRKQYTAFIRKLLDDPSQSSELLSEAKKLNDSQAPK

SEQ ID NO: 956 - protein, 58 aa, synthetic construct
  REGION 1..58: note = Engineered IL-1R-I binding polypeptide
VDAKYAKEVEAAYYEIYELPNLTRKQYTAFIRKLLDDPSQSSELLSEAKKLNDSQAPK

SEQ ID NO: 957 - protein, 58 aa, synthetic construct
  REGION 1..58: note = Engineered IL-1R-I binding polypeptide
VDAKYAKEVEIAYDEIYRLPNLTRKQYTAFIRKLLDDPSQSSELLSEAKKLNDSQAPK

SEQ ID NO: 958 - protein, 58 aa, synthetic construct
  REGION 1..58: note = Engineered IL-1R-I binding polypeptide
VDAKYAKEHEEAYWEIYALPNLTRKQYTAFIRKLLDDPSQSSELLSEAKKLNDSQAPK

SEQ ID NO: 959 - protein, 58 aa, synthetic construct
  REGION 1..58: note = Engineered IL-1R-I binding polypeptide
VDAKYAKEVYLAQMEIFSLPNLTRKQYTAFIRKLLDDPSQSSELLSEAKKLNDSQAPK

SEQ ID NO: 960 - protein, 58 aa, synthetic construct
  REGION 1..58: note = Engineered IL-1R-I binding polypeptide
VDAKYAKETEKAQMEIFQLPNLTRKQYTAFIRKLLDDPSQSSELLSEAKKLNDSQAPK

SEQ ID NO: 961 - protein, 58 aa, synthetic construct
  REGION 1..58: note = Engineered IL-1R-I binding polypeptide
VDAKYAKELEEAYMEIYALPNLTRKQYTAFIRKLLDDPSQSSELLSEAKKLNDSQAPK

SEQ ID NO: 962 - protein, 58 aa, synthetic construct
  REGION 1..58: note = Engineered IL-1R-I binding polypeptide
VDAKYAKEVYEAYDEIYNLPNLTRKQYTAFIRKLLDDPSQSSELLSEAKKLNDSQAPK

SEQ ID NO: 963 - protein, 58 aa, synthetic construct
  REGION 1..58: note = Engineered IL-1R-I binding polypeptide
VDAKYAKETIEAYEEIYELPNLTRKQYTAFIRKLLDDPSQSSELLSEAKKLNDSQAPK

SEQ ID NO: 964 - protein, 58 aa, synthetic construct
  REGION 1..58: note = Engineered IL-1R-I binding polypeptide
VDAKYAKEHIEAYDEIFKLPNLTRKQYTAFIRKLLDDPSQSSELLSEAKKLNDSQAPK

SEQ ID NO: 965 - protein, 58 aa, synthetic construct
  REGION 1..58: note = Engineered IL-1R-I binding polypeptide
VDAKYAKEAQLAYWEIYGLPNLTRKQYTAFIRKLLDDPSQSSELLSEAKKLNDSQAPK

SEQ ID NO: 966 - protein, 58 aa, synthetic construct
  REGION 1..58: note = Engineered IL-1R-I binding polypeptide
VDAKYAKEVFDAQMEIFSLPNLTRKQYTAFIRKLLDDPSQSSELLSEAKKLNDSQAPK

SEQ ID NO: 967 - protein, 58 aa, synthetic construct
  REGION 1..58: note = Engineered IL-1R-I binding polypeptide
VDAKYAKEIEEAQMEIYYLPNLTRKQYTAFIRKLLDDPSQSSELLSEAKKLNDSQAPK

SEQ ID NO: 968 - protein, 58 aa, synthetic construct
  REGION 1..58: note = Engineered IL-1R-I binding polypeptide
VDAKYAKEVEKAYFEIFKLPNLTRKQYTAFIRKLLDDPSQSSELLSEAKKLNDSQAPK

SEQ ID NO: 969 - protein, 58 aa, synthetic construct
  REGION 1..58: note = Engineered IL-1R-I binding polypeptide
VDAKYAKEVEVAYYEIYGLPNLTRKQYTAFIRKLLDDPSQSSELLSEAKKLNDSQAPK

SEQ ID NO: 970 - protein, 58 aa, synthetic construct
  REGION 1..58: note = Engineered IL-1R-I binding polypeptide
VDAKYAKEVEYAYFEIYNLPNLTRKQYTAFIRKLLDDPSQSSELLSEAKKLNDSQAPK

SEQ ID NO: 971 - protein, 58 aa, synthetic construct
  REGION 1..58: note = Engineered IL-1R-I binding polypeptide
VDAKYAKEVIAAYYEIYELPNLTRKQYTAFIRKLLDDPSQSSELLSEAKKLNDSQAPK

SEQ ID NO: 972 - protein, 58 aa, synthetic construct
  REGION 1..58: note = Engineered IL-1R-I binding polypeptide
VDAKYAKEVVDAYMEIYGLPNLTRKQYTAFIRKLLDDPSQSSELLSEAKKLNDSQAPK

SEQ ID NO: 973 - protein, 58 aa, synthetic construct
  REGION 1..58: note = Engineered IL-1R-I binding polypeptide
VDAKYAKEAETAYFEIYALPNLTRKQYTAFIRKLLDDPSQSSELLSEAKKLNDSQAPK

SEQ ID NO: 974 - protein, 58 aa, synthetic construct
  REGION 1..58: note = Engineered IL-1R-I binding polypeptide
VDAKYAKEVEEAQMEIYRLPNLTRKQYTAFIRKLLDDPSQSSELLSEAKKLNDSQAPK

SEQ ID NO: 975 - protein, 58 aa, synthetic construct
  REGION 1..58: note = Engineered IL-1R-I binding polypeptide
VDAKYAKEAEAAYFEIFALPNLTRKQYTAFIRKLLDDPSQSSELLSEAKKLNDSQAPK

SEQ ID NO: 976 - protein, 58 aa, synthetic construct
  REGION 1..58: note = Engineered IL-1R-I binding polypeptide
VDAKYAKEVEAAQMEIFDLPNLTRRQYTAFIRKLLDDPSQSSELLSEAKKLNDSQAPK

SEQ ID NO: 977 - protein, 58 aa, synthetic construct
  REGION 1..58: note = Engineered IL-1R-I binding polypeptide
VDAKYAKELEWAYFEIYALPNLTRKQYTAFIRKLLDDPSQSSELLSEAKKLNDSQAPK

SEQ ID NO: 978 - protein, 58 aa, synthetic construct
  REGION 1..58: note = Engineered IL-1R-I binding polypeptide
VDAKYAKEQKQAYWEIYALPNLTRKQYTAFIRKLLDDPSQSSELLSEAKKLNDSQAPK

SEQ ID NO: 979 - protein, 58 aa, synthetic construct
  REGION 1..58: note = Engineered IL-1R-I binding polypeptide
VDAKYAKEAEDAYYEIYALPNLTRKQYTAFIRKLLDDPSQSSELLSEAKKLNDSQAPK

SEQ ID NO: 980 - protein, 58 aa, synthetic construct
  REGION 1..58: note = Engineered IL-1R-I binding polypeptide
VDAKYAKEQHEAYWEIYRLPNLTRKQYTAFIRKLLDDPSQSSELLSEAKKLNDSQAPK

SEQ ID NO: 981 - protein, 58 aa, synthetic construct
  REGION 1..58: note = Engineered IL-1R-I binding polypeptide
VDAKYAKEVEDAYMEIFGLPNLTRKQYTAFIRKLLDDPSQSSELLSEAKKLNDSQAPK

SEQ ID NO: 982 - protein, 58 aa, synthetic construct
  REGION 1..58: note = Engineered IL-1R-I binding polypeptide
VDAKYAKEVDHAYFEIYRLPNLTRKQYTAFIRKLLDDPSQSSELLSEAKKLNDSQAPK

SEQ ID NO: 983 - protein, 58 aa, synthetic construct
  REGION 1..58: note = Engineered IL-1R-I binding polypeptide
VDAKYAKEAIEAYDEIFLLPNLTRKQYTAFIRKLLDDPSQSSELLSEAKKLNDSQAPK

SEQ ID NO: 984 - protein, 58 aa, synthetic construct
  REGION 1..58: note = Engineered IL-1R-I binding polypeptide
VDAKYAKEVVEAYWEIYALPNLTRKQYTAFIRKLLDDPSQSSELLSEAKKLNDSQAPK

SEQ ID NO: 985 - protein, 58 aa, synthetic construct
  REGION 1..58: note = Engineered IL-1R-I binding polypeptide
VDAKYAKETEDAQMEIFSLPNLTRKQYTAFIRKLLDDPSQSSELLSEAKKLNDSQAPK

SEQ ID NO: 986 - protein, 58 aa, synthetic construct
  REGION 1..58: note = Engineered IL-1R-I binding polypeptide
VDAKYAKEVIDAYYEIYELPNLTRKQYTAFIRKLLDDPSQSSELLSEAKKLNDSQAPK

SEQ ID NO: 987 - protein, 58 aa, synthetic construct
  REGION 1..58: note = Engineered IL-1R-I binding polypeptide
VDAKYAKEAIDAYHEIFALPNLTRKQYTAFIRKLLDDPSQSSELLSEAKKLNDSQAPK

SEQ ID NO: 988 - protein, 58 aa, synthetic construct
  REGION 1..58: note = Engineered IL-1R-I binding polypeptide
VDAKYAKETHDAYMEIYHLPNLTRKQYTAFIRKLLDDPSQSSELLSEAKKLNDSQAPK

SEQ ID NO: 989 - protein, 58 aa, synthetic construct
  REGION 1..58: note = Engineered IL-1R-I binding polypeptide
VDAKYAKEIESAYMEIFYLPNLTRKQYTAFIRKLLDDPSQSSELLSEAKKLNDSQAPK

SEQ ID NO: 990 - protein, 58 aa, synthetic construct
  REGION 1..58: note = Engineered IL-1R-I binding polypeptide
VDAKYAKEIEKAYMEIYHLPNLTRRQYTAFIRKLLDDPSQSSELLSEAKKLNDSQAPK

SEQ ID NO: 991 - protein, 58 aa, synthetic construct
  REGION 1..58: note = Engineered IL-1R-I binding polypeptide
VDAKYAKEAEDAYQEIFQLPNLTRKQYTAFIRKLLDDPSQSSELLSEAKKLNDSQAPK

SEQ ID NO: 992 - protein, 58 aa, synthetic construct
  REGION 1..58: note = Engineered IL-1R-I binding polypeptide
VDAKYAKEVEEAYMEIFALPNLTRKQYTAFIRKLLDDPSQSSELLSEAKKLNDSQAPK

SEQ ID NO: 993 - protein, 58 aa, synthetic construct
  REGION 1..58: note = Engineered IL-1R-I binding polypeptide
VDAKYAKEVEDAQMEIFELPNLTRRQYTAFIRKLLDDPSQSSELLSEAKKLNDSQAPK

SEQ ID NO: 994 - protein, 58 aa, synthetic construct
  REGION 1..58: note = Engineered IL-1R-I binding polypeptide
VDAKYAKEVENAQYEIYGLPNLTRKQYTAFIRKLLDDPSQSSELLSEAKKLNDSQAPK

SEQ ID NO: 995 - protein, 58 aa, synthetic construct
  REGION 1..58: note = Engineered IL-1R-I binding polypeptide
VDAKYAKEVEVAYMEIYALPNLTRKQYTAFIRKLLDDPSQSSELLSEAKKLNDSQAPK

SEQ ID NO: 996 - protein, 58 aa, synthetic construct
  REGION 1..58: note = Engineered IL-1R-I binding polypeptide
VDAKYAKESEQAYWEIFHLPNLTRKQYTAFIRKLLDDPSQSSELLSEAKKLNDSQAPK

SEQ ID NO: 997 - protein, 58 aa, synthetic construct
  REGION 1..58: note = Engineered IL-1R-I binding polypeptide
VDAKYAKETVDAYEEIFTLPNLTRKQYTAFIRKLLDDPSQSSELLSEAKKLNDSQAPK

SEQ ID NO: 998 - protein, 58 aa, synthetic construct
  REGION 1..58: note = Engineered IL-1R-I binding polypeptide
VDAKYAKEIEEAYMEIYHLPNLTRKQYTAFIRKLLDDPSQSSELLSEAKKLNDSQAPK

SEQ ID NO: 999 - protein, 58 aa, synthetic construct
  REGION 1..58: note = Engineered IL-1R-I binding polypeptide
VDAKYAKEVVVAYEEIFKLPNLTRKQYTAFIRKLLDDPSQSSELLSEAKKLNDSQAPK

SEQ ID NO: 1000 - protein, 58 aa, synthetic construct
  REGION 1..58: note = Engineered IL-1R-I binding polypeptide
VDAKYAKEAVNAYWEIYALPNLTRKQYTAFIRKLLDDPSQSSELLSEAKKLNDSQAPK

SEQ ID NO: 1001 - protein, 58 aa, synthetic construct
  REGION 1..58: note = Engineered IL-1R-I binding polypeptide
VDAKYAKESEKAYMEIFALPNLTRKQYTAFIRKLLDDPSQSSELLSEAKKLNDSQAPK

SEQ ID NO: 1002 - protein, 58 aa, synthetic construct
  REGION 1..58: note = Engineered IL-1R-I binding polypeptide
VDAKYAKEVEEAYFEIYLLPNLTRKQYTAFIRKLLDDPSQSSELLSEAKKLNDSQAPK

SEQ ID NO: 1003 - protein, 58 aa, synthetic construct
  REGION 1..58: note = Engineered IL-1R-I binding polypeptide
VDAKYAKEIEAAQMEIFGLPNLTRRQYTAFIRKLLDDPSQSSELLSEAKKLNDSQAPK

SEQ ID NO: 1004 - protein, 58 aa, synthetic construct
  REGION 1..58: note = Engineered IL-1R-I binding polypeptide
VDAKYAKEQEKAYFEIYALPNLTRKQYTAFIRKLLDDPSQSSELLSEAKKLNDSQAPK

SEQ ID NO: 1005 - protein, 58 aa, synthetic construct
  REGION 1..58: note = Engineered IL-1R-I binding polypeptide
VDAKYAKEVEIAYYEIFALPNLTRRQYTAFIRKLLDDPSQSSELLSEAKKLNDSQAPK

SEQ ID NO: 1006 - protein, 58 aa, synthetic construct
  REGION 1..58: note = Engineered IL-1R-I binding polypeptide
VDAKYAKEVYAAYEEIFGLPNLTRKQYTAFIRKLLDDPSQSSELLSEAKKLNDSQAPK

SEQ ID NO: 1007 - protein, 58 aa, synthetic construct
  REGION 1..58: note = Engineered IL-1R-I binding polypeptide
VDAKYAKEVESAQMEIFGLPNLTRKQYTAFIRKLLDDPSQSSELLSEAKKLNDSQAPK

SEQ ID NO: 1008 - protein, 58 aa, synthetic construct
  REGION 1..58: note = Engineered IL-1R-I binding polypeptide
VDAKYAKELEVAYMEIYELPNLTRKQYTAFIRKLLDDPSQSSELLSEAKKLNDSQAPK

SEQ ID NO: 1009 - protein, 58 aa, synthetic construct
  REGION 1..58: note = Engineered IL-1R-I binding polypeptide
VDAKYAKETINAYWEIYALPNLTRKQYTAFIRKLLDDPSQSSELLSEAKKLNDSQAPK

SEQ ID NO: 1010 - protein, 58 aa, synthetic construct
  REGION 1..58: note = Engineered IL-1R-I binding polypeptide
VDAKYAKEAETAYWEIYKLPNLTRKQYTAFIRKLLDDPSQSSELLSEAKKLNDSQAPK

SEQ ID NO: 1011 - protein, 58 aa, synthetic construct
  REGION 1..58: note = Engineered IL-1R-I binding polypeptide
VDAKYAKETEAAYWEIFALPNLTRKQYTAFIRKLLDDPSQSSELLSEAKKLNDSQAPK

SEQ ID NO: 1012 - protein, 58 aa, synthetic construct
  REGION 1..58: note = Engineered IL-1R-I binding polypeptide
VDAKYAKELQKAYMEIYELPNLTRKQYTAFIRKLLDDPSQSSELLSEAKKLNDSQAPK

SEQ ID NO: 1013 - protein, 58 aa, synthetic construct
  REGION 1..58: note = Engineered IL-1R-I binding polypeptide
VDAKYAKELEVAYFEIYDLPNLTRKQYTAFIRKLLDDPSQSSELLSEAKKLNDSQAPK

SEQ ID NO: 1014 - protein, 58 aa, synthetic construct
  REGION 1..58: note = Engineered IL-1R-I binding polypeptide
VDAKYAKEVEYAYWEIFALPNLTRKQYTAFIRKLLDDPSQSSELLSEAKKLNDSQAPK

SEQ ID NO: 1015 - protein, 58 aa, synthetic construct
  REGION 1..58: note = Engineered IL-1R-I binding polypeptide
VDAKYAKETEEAYFEIYGLPNLTRKQYTAFIRKLLDDPSQSSELLSEAKKLNDSQAPK

SEQ ID NO: 1016 - protein, 58 aa, synthetic construct
  REGION 1..58: note = Engineered IL-1R-I binding polypeptide
VDAKYAKELESAYMEIYGLPNLTRKQYTAFIRKLLDDPSQSSELLSEAKKLNDSQAPK

SEQ ID NO: 1017 - protein, 58 aa, synthetic construct
  REGION 1..58: note = Engineered IL-1R-I binding polypeptide
VDAKYAKEVEVAYMEIFGLPNLTRKQYTAFIRKLLDDPSQSSELLSEAKKLNDSQAPK

SEQ ID NO: 1018 - protein, 58 aa, synthetic construct
  REGION 1..58: note = Engineered IL-1R-I binding polypeptide
VDAKYAKEVEDAYMEIYELPNLTRRQYTAFIRKLLDDPSQSSELLSEAKKLNDSQAPK

SEQ ID NO: 1019 - protein, 58 aa, synthetic construct
  REGION 1..58: note = Engineered IL-1R-I binding polypeptide
VDAKYAKEHVDAYYEIYGLPNLTRKQYTAFIRKLLDDPSQSSELLSEAKKLNDSQAPK

SEQ ID NO: 1020 - protein, 58 aa, synthetic construct
  REGION 1..58: note = Engineered IL-1R-I binding polypeptide
VDAKYAKEHERAYFEIYALPNLTRKQYTAFIRKLLDDPSQSSELLSEAKKLNDSQAPK

SEQ ID NO: 1021 - protein, 58 aa, synthetic construct
  REGION 1..58: note = Engineered IL-1R-I binding polypeptide
VDAKYAKEATEAYWEIYALPNLTRKQYTAFIRKLLDDPSQSSELLSEAKKLNDSQAPK

SEQ ID NO: 1022 - protein, 58 aa, synthetic construct
  REGION 1..58: note = Engineered IL-1R-I binding polypeptide
VDAKYAKEVYKAQMEIFGLPNLTRKQYTAFIRKLLDDPSQSSELLSEAKKLNDSQAPK

SEQ ID NO: 1023 - protein, 58 aa, synthetic construct
  REGION 1..58: note = Engineered IL-1R-I binding polypeptide
VDAKYAKEVERAYMEIFRLPNLTRKQYTAFIRKLLDDPSQSSELLSEAKKLNDSQAPK

SEQ ID NO: 1024 - protein, 58 aa, synthetic construct
  REGION 1..58: note = Engineered IL-1R-I binding polypeptide
VDAKYAKELEHAQLEIFRLPNLTRKQYTAFIRKLLDDPSQSSELLSEAKKLNDSQAPK

SEQ ID NO: 1025 - protein, 58 aa, synthetic construct
  REGION 1..58: note = Engineered IL-1R-I binding polypeptide
VDAKYAKEAQAAYDEIYGLPNLTRKQYTAFIRKLLDDPSQSSELLSEAKKLNDSQAPK

SEQ ID NO: 1026 - protein, 58 aa, synthetic construct
  REGION 1..58: note = Engineered IL-1R-I binding polypeptide
VDAKYAKEVEEAQMEIYELPNLTRKQYTAFIRKLLDDPSQSSELLSEAKKLNDSQAPK

SEQ ID NO: 1027 - protein, 58 aa, synthetic construct
  REGION 1..58: note = Engineered IL-1R-I binding polypeptide
VDAKYAKEVEEAYMEIFHLPNLTRKQYTAFIRKLLDDPSQSSELLSEAKKLNDSQAPK

SEQ ID NO: 1028 - protein, 58 aa, synthetic construct
  REGION 1..58: note = Engineered IL-1R-I binding polypeptide
VDAKYAKEVEHAYFEIYGLPNLTRKQYTAFIRKLLDDPSQSSELLSEAKKLNDSQAPK

SEQ ID NO: 1029 - protein, 58 aa, synthetic construct
  REGION 1..58: note = Engineered IL-1R-I binding polypeptide
VDAKYAKEVESAQMEIYYLPNLTRKQYTAFIRKLLDDPSQSSELLSEAKKLNDSQAPK

SEQ ID NO: 1030 - protein, 58 aa, synthetic construct
  REGION 1..58: note = Engineered IL-1R-I binding polypeptide
VDAKYAKEVEKAQMEIFYLPNLTRKQYTAFIRKLLDDPSQSSELLSEAKKLNDSQAPK

SEQ ID NO: 1031 - protein, 58 aa, synthetic construct
  REGION 1..58: note = Engineered IL-1R-I binding polypeptide
VDAKYAKEVDEAYMEIFKLPNLTRKQYTAFIRKLLDDPSQSSELLSEAKKLNDSQAPK

SEQ ID NO: 1032 - protein, 58 aa, synthetic construct
  REGION 1..58: note = Engineered IL-1R-I binding polypeptide
VDAKYAKETEEAYMEIYHLPNLTRKQYTAFIRKLLDDPSQSSELLSEAKKLNDSQAPK

SEQ ID NO: 1033 - protein, 58 aa, synthetic construct
  REGION 1..58: note = Engineered IL-1R-I binding polypeptide
VDAKYAKEAEAAYFEIYGLPNLTRKQYTAFIRKLLDDPSQSSELLSEAKKLNDSQAPK

SEQ ID NO: 1034 - protein, 58 aa, synthetic construct
  REGION 1..58: note = Engineered IL-1R-I binding polypeptide
VDAKYAKELEDAYMEIYHLPNLTRKQYTAFIRKLLDDPSQSSELLSEAKKLNDSQAPK

SEQ ID NO: 1035 - protein, 58 aa, synthetic construct
  REGION 1..58: note = Engineered IL-1R-I binding polypeptide
VDAKYAKEVEVAYEEIYELPNLTRKQYTAFIRKLLDDPSQSSELLSEAKKLNDSQAPK

SEQ ID NO: 1036 - protein, 58 aa, synthetic construct
  REGION 1..58: note = Engineered IL-1R-I binding polypeptide
VDAKYAKEAVEAYWEIYGLPNLTRKQYTAFIRKLLDDPSQSSELLSEAKKLNDSQAPK

SEQ ID NO: 1037 - protein, 58 aa, synthetic construct
  REGION 1..58: note = Engineered IL-1R-I binding polypeptide
VDAKYAKELEEAYMEIYFLPNLTRKQYTAFIRKLLDDPSQSSELLSEAKKLNDSQAPK

SEQ ID NO: 1038 - protein, 58 aa, synthetic construct
  REGION 1..58: note = Engineered IL-1R-I binding polypeptide
VDAKYAKEVENAYMEIYELPNLTRKQYTAFIRKLLDDPSQSSELLSEAKKLNDSQAPK

SEQ ID NO: 1039 - protein, 58 aa, synthetic construct
  REGION 1..58: note = Engineered IL-1R-I binding polypeptide
VDAKYAKETVKAYEEIYKLPNLTRKQYTAFIRKLLDDPSQSSELLSEAKKLNDSQAPK

SEQ ID NO: 1040 - protein, 58 aa, synthetic construct
  REGION 1..58: note = Engineered IL-1R-I binding polypeptide
VDAKYAKELEKAQMEIFSLPNLTRKQYTAFIRKLLDDPSQSSELLSEAKKLNDSQAPK

SEQ ID NO: 1041 - protein, 58 aa, synthetic construct
  REGION 1..58: note = Engineered IL-1R-I binding polypeptide
VDAKYAKETEKAQLEIFELPNLTRKQYTAFIRKLLDDPSQSSELLSEAKKLNDSQAPK

SEQ ID NO: 1042 - protein, 58 aa, synthetic construct
  REGION 1..58: note = Engineered IL-1R-I binding polypeptide
VDAKYAKEVELAYMEIFHLPNLTRKQYTAFIRKLLDDPSQSSELLSEAKKLNDSQAPK

SEQ ID NO: 1043 - protein, 58 aa, synthetic construct
  REGION 1..58: note = Engineered IL-1R-I binding polypeptide
VDAKYAKEAENAYWEIYELPNLTRRQYTAFIRKLLDDPSQSSELLSEAKKLNDSQAPK

SEQ ID NO: 1044 - protein, 58 aa, synthetic construct
  REGION 1..58: note = Engineered IL-1R-I binding polypeptide
VDAKYAKEVIQAYWEIYHLPNLTRKQYTAFIRKLLDDPSQSSELLSEAKKLNDSQAPK

SEQ ID NO: 1045 - protein, 58 aa, synthetic construct
  REGION 1..58: note = Engineered IL-1R-I binding polypeptide
VDAKYAKEAEYAYMEIFRLPNLTRKQYTAFIRKLLDDPSQSSELLSEAKKLNDSQAPK

SEQ ID NO: 1046 - protein, 58 aa, synthetic construct
  REGION 1..58: note = Engineered IL-1R-I binding polypeptide
VDAKYAKEVESAYMEIYHLPNLTRKQYTAFIRKLLDDPSQSSELLSEAKKLNDSQAPK

SEQ ID NO: 1047 - protein, 58 aa, synthetic construct
  REGION 1..58: note = Engineered IL-1R-I binding polypeptide
VDAKYAKETEDAYMEIFRLPNLTRKQYTAFIRKLLDDPSQSSELLSEAKKLNDSQAPK

SEQ ID NO: 1048 - protein, 58 aa, synthetic construct
  REGION 1..58: note = Engineered IL-1R-I binding polypeptide
VDAKYAKEVDAAYFEIFNLPNLTRKQYTAFIRKLLDDPSQSSELLSEAKKLNDSQAPK

SEQ ID NO: 1049 - protein, 58 aa, synthetic construct
  REGION 1..58: note = Engineered IL-1R-I binding polypeptide
VDAKYAKEAEDAYFEIYSLPNLTRKQYTAFIRKLLDDPSQSSELLSEAKKLNDSQAPK

SEQ ID NO: 1050 - protein, 58 aa, synthetic construct
  REGION 1..58: note = Engineered IL-1R-I binding polypeptide
VDAKYAKELEDAYMEIFGLPNLTRKQYTAFIRKLLDDPSQSSELLSEAKKLNDSQAPK

SEQ ID NO: 1051 - protein, 58 aa, synthetic construct
  REGION 1..58: note = Engineered IL-1R-I binding polypeptide
VDAKYAKEVEAAYFEIYGLPNLTRKQYTAFIRKLLDDPSQSSELLSEAKKLNDSQAPK

SEQ ID NO: 1052 - protein, 58 aa, synthetic construct
  REGION 1..58: note = Engineered IL-1R-I binding polypeptide
VDAKYAKEVEFAYYEIFALPNLTRKQYTAFIRKLLDDPSQSSELLSEAKKLNDSQAPK

SEQ ID NO: 1053 - protein, 58 aa, synthetic construct
  REGION 1..58: note = Engineered IL-1R-I binding polypeptide
VDAKYAKEVVSAYWEIYALPNLTRRQYTAFIRKLLDDPSQSSELLSEAKKLNDSQAPK

SEQ ID NO: 1054 - protein, 58 aa, synthetic construct
  REGION 1..58: note = Engineered IL-1R-I binding polypeptide
VDAKYAKETEKAYFEIYALPNLTRKQYTAFIRKLLDDPSQSSELLSEAKKLNDSQAPK

SEQ ID NO: 1055 - protein, 58 aa, synthetic construct
  REGION 1..58: note = Engineered IL-1R-I binding polypeptide
VDAKYAKEAEYAYMEIYNLPNLTRKQYTAFIRKLLDDPSQSSELLSEAKKLNDSQAPK

SEQ ID NO: 1056 - protein, 58 aa, synthetic construct
  REGION 1..58: note = Engineered IL-1R-I binding polypeptide
VDAKYAKEVESAYMEIYRLPNLTRKQYTAFIRKLLDDPSQSSELLSEAKKLNDSQAPK

SEQ ID NO: 1057 - protein, 58 aa, synthetic construct
  REGION 1..58: note = Engineered IL-1R-I binding polypeptide
VDAKYAKEVEVAYMEIYGLPNLTRKQYTAFIRKLLDDPSQSSELLSEAKKLNDSQAPK

SEQ ID NO: 1058 - protein, 58 aa, synthetic construct
  REGION 1..58: note = Engineered IL-1R-I binding polypeptide
VDAKYAKEIEFAYMEIFHLPNLTRKQYTAFIRKLLDDPSQSSELLSEAKKLNDSQAPK

SEQ ID NO: 1059 - protein, 58 aa, synthetic construct
  REGION 1..58: note = Engineered IL-1R-I binding polypeptide
VDAKYAKEVVEAYFEIYELPNLTRKQYTAFIRKLLDDPSQSSELLSEAKKLNDSQAPK

SEQ ID NO: 1060 - protein, 58 aa, synthetic construct
  REGION 1..58: note = Engineered IL-1R-I binding polypeptide
VDAKYAKEIEAAQMEIFALPNLTRKQYTAFIRKLFDDPSQSSELLSEAKKLNDSQAPK

SEQ ID NO: 1061 - protein, 58 aa, synthetic construct
  REGION 1..58: note = Engineered IL-1R-I binding polypeptide
VDAKYAKEVEDAQMEIFGLPNLTRKQYTAFIRKLFDDPSQSSELLSEAKKLNDSQAPK

SEQ ID NO: 1062 - protein, 58 aa, synthetic construct
  REGION 1..58: note = Engineered IL-1R-I binding polypeptide
VDAKYAKEIEEAQMEIYGLPNLTRKQYTAFIRKLLDDPSQSSELLSEAKKLNDSQAPK

SEQ ID NO: 1063 - protein, 58 aa, synthetic construct
  REGION 1..58: note = Engineered IL-1R-I binding polypeptide
VDAKYAKETLDAQMEIFALPNLTRKQYTAFIRKLLDDPSQSSELLSEAKKLNDSQAPK

SEQ ID NO: 1064 - protein, 58 aa, synthetic construct
  REGION 1..58: note = Engineered IL-1R-I binding polypeptide
VDAKYAKETQEAQMEIFALPNLTRKQYTAFIRKLLDDPSQSSELLSEAKKLNDSQAPK

SEQ ID NO: 1065 - protein, 58 aa, synthetic construct
  REGION 1..58: note = Engineered IL-1R-I binding polypeptide
VDAKYAKEVEEAQMEIFALPNLTRKQYTAFIRKLFDDPSQSSELLSEAKKLNDSQAPK

SEQ ID NO: 1066 - protein, 58 aa, synthetic construct
  REGION 1..58: note = Engineered IL-1R-I binding polypeptide
VDAKYAKEVEDAQMEIFALPNLTRKQYTAFIRKLFDDPSQSSELLSEAKKLNDSQAPK

SEQ ID NO: 1067 - protein, 58 aa, synthetic construct
  REGION 1..58: note = Engineered IL-1R-I binding polypeptide
VDAKYAKEVESAQMEIFYLPNLTRKQYTAFIRKLFDDPSQSSELLSEAKKLNDSQAPK

SEQ ID NO: 1068 - protein, 58 aa, synthetic construct
  REGION 1..58: note = Engineered IL-1R-I binding polypeptide
VDAKYAKEIEDAQMEIFALPNLTRKQYTAFIRKLLDDPSQSSELLSEAKKLNDSQAPK

SEQ ID NO: 1069 - protein, 58 aa, synthetic construct
  REGION 1..58: note = Engineered IL-1R-I binding polypeptide
VDAKYAKEVEAAQMEIFFLPNLTRRQYTAFIRKLLDDPSQSSELLSEAKKLNDSQAPK

SEQ ID NO: 1070 - protein, 58 aa, synthetic construct
  REGION 1..58: note = Engineered IL-1R-I binding polypeptide
VDAKYAKEVEEAQLEIFALPNLTRKQYTAFIIKLFDDPSQSSELLSEAKKLNDSQAPK

SEQ ID NO: 1071 - protein, 58 aa, synthetic construct
  REGION 1..58: note = Engineered IL-1R-I binding polypeptide
VDAKYAKETEDAQMEIFALPNLTRKQYTAFIRKLLDDPSQSSELLSEAKKLNDSQAPK

SEQ ID NO: 1072 - protein, 58 aa, synthetic construct
  REGION 1..58: note = Engineered IL-1R-I binding polypeptide
VDAKYAKEIEIAQMEIFRLPNLTRKQYTAFIRKLFDDPSQSSELLSEAKKLNDSQAPK

SEQ ID NO: 1073 - protein, 58 aa, synthetic construct
  REGION 1..58: note = Engineered IL-1R-I binding polypeptide
VDAKYAKEVEIAQMEIFALPNLTRKQYTAFIRKLFDDPSQSSELLSEAKKLNDSQAPK

SEQ ID NO: 1074 - protein, 58 aa, synthetic construct
  REGION 1..58: note = Engineered IL-1R-I binding polypeptide
VDAKYAKEIEIAQMEIFSLPNLTRKQYTAFIRKLFDDPSQSSELLSEAKKLNDSQAPK

SEQ ID NO: 1075 - protein, 58 aa, synthetic construct
  REGION 1..58: note = Engineered IL-1R-I binding polypeptide
VDAKYAKETEAAQMEIFYLPNLTRKQYTAFIRKLLDDPSQSSELLSEAKKLNDSQAPK

SEQ ID NO: 1076 - protein, 58 aa, synthetic construct
  REGION 1..58: note = Engineered IL-1R-I binding polypeptide
VDAKYAKEIEDAQMEIFALPNLTRKQYTAFIRKLFDDPSQSSELLSEAKKLNDSQAPK

SEQ ID NO: 1077 - protein, 58 aa, synthetic construct
  REGION 1..58: note = Engineered IL-1R-I binding polypeptide
VDAKYAKEVEHAQMEIFDLPNLTRKQYTAFIRKLLDDPSQSSELLSEAKKLNDSQAPK

SEQ ID NO: 1078 - protein, 58 aa, synthetic construct
  REGION 1..58: note = Engineered IL-1R-I binding polypeptide
VDAKYAKEVVSAQMEIFGLPNLTRRQYTAFIRKLLDDPSQSSELLSEAKKLNDSQAPK

SEQ ID NO: 1079 - protein, 58 aa, synthetic construct
  REGION 1..58: note = Engineered IL-1R-I binding polypeptide
VDAKYAKELDEAYFEIYGLPNLTRKQYTAFIRKLLDDPSQSSELLSEAKKLNDSQAPK

SEQ ID NO: 1080 - protein, 58 aa, synthetic construct
  REGION 1..58: note = Engineered IL-1R-I binding polypeptide
VDAKYAKEVEHAQLEIFRLPNLTRRQYTAFIRKLLDDPSQSSELLSEAKKLNDSQAPK

SEQ ID NO: 1081 - protein, 58 aa, synthetic construct
  REGION 1..58: note = Engineered IL-1R-I binding polypeptide
VDAKYAKEAYKAQMEIFGLPNLTRKQYTAFIRKLLDDPSQSSELLSEAKKLNDSQAPK

SEQ ID NO: 1082 - protein, 58 aa, synthetic construct
  REGION 1..58: note = Engineered IL-1R-I binding polypeptide
VDAKYAKEIELAQMEIFFLPNLTRKQYTAFIRKLFDDPSQSSELLSEAKKLNDSQAPK

SEQ ID NO: 1083 - protein, 58 aa, synthetic construct
  REGION 1..58: note = Engineered IL-1R-I binding polypeptide
VDAKYAKEVEHAQMEIFTLPNLTRKQYTAFIRKLLDDPSQSSELLSEAKKLNDSQAPK

SEQ ID NO: 1084 - protein, 58 aa, synthetic construct
  REGION 1..58: note = Engineered IL-1R-I binding polypeptide
VDAKYAKEVKIAQMEIYELPNLTRKQYTAFIRKLLDDPSQSSELLSEAKKLNDSQAPK

SEQ ID NO: 1085 - protein, 58 aa, synthetic construct
  REGION 1..58: note = Engineered IL-1R-I binding polypeptide
VDAKYAKEAEDAYQEIFGLPNLTRKQYTAFIRKLLDDPSQSSELLSEAKKLNDSQAPK

SEQ ID NO: 1086 - protein, 58 aa, synthetic construct
  REGION 1..58: note = Engineered IL-1R-I binding polypeptide
VDAKYAKEAENAYDEIYKLPNLTRKQYTAFIRKLLDDPSQSSELLSEAKKLNDSQAPK

SEQ ID NO: 1087 - protein, 58 aa, synthetic construct
  REGION 1..58: note = Engineered IL-1R-I binding polypeptide
VDAKYAKEIEAAQIEIFHLPNLTRKQYTAFIRKLFDDPSQSSELLSEAKKLNDSQAPK

SEQ ID NO: 1088 - protein, 58 aa, synthetic construct
  REGION 1..58: note = Engineered IL-1R-I binding polypeptide
VDAKYAKEVVDAQQEIFNLPNLTRKQYTAFIRKLFDDPSQSSELLSEAKKLNDSQAPK

SEQ ID NO: 1089 - protein, 58 aa, synthetic construct
  REGION 1..58: note = Engineered IL-1R-I binding polypeptide
VDAKYAKEIEWAQMEIFALPNLTRKQYTAFIRKLLDDPSQSSELLSEAKKLNDSQAPK

SEQ ID NO: 1090 - protein, 58 aa, synthetic construct
  REGION 1..58: note = Engineered IL-1R-I binding polypeptide
VDAKYAKEIEDAQMEIYELPNLTRKQYTAFIRKLFDDPSQSSELLSEAKKLNDSQAPK

SEQ ID NO: 1091 - protein, 58 aa, synthetic construct
  REGION 1..58: note = Engineered IL-1R-I binding polypeptide
VDAKYAKEAEKAQIEIFYLPNLTRRQYTAFIRKLLDDPSQSSELLSEAKKLNDSQAPK

SEQ ID NO: 1092 - protein, 58 aa, synthetic construct
  REGION 1..58: note = Engineered IL-1R-I binding polypeptide
VDAKYAKEAEWAQMEIYSLPNLTRKQYTAFIRKLFDDPSQSSELLSEAKKLNDSQAPK

SEQ ID NO: 1093 - protein, 58 aa, synthetic construct
  REGION 1..58: note = Engineered IL-1R-I binding polypeptide
VDAKYAKEVEAAYMEIFQLPNLTRKQYTAFIRKLLDDPSQSSELLSEAKKLNDSQAPK

SEQ ID NO: 1094 - protein, 58 aa, synthetic construct
  REGION 1..58: note = Engineered IL-1R-I binding polypeptide
VDAKYAKEVEIAQMEIYSLPNLTRRQYTAFIRKLLDDPSQSSELLSEAKKLNDSQAPK

SEQ ID NO: 1095 - protein, 58 aa, synthetic construct
  REGION 1..58: note = Engineered IL-1R-I binding polypeptide
VDAKYAKEIKAAQMEIFALPNLTRKQYTAFIRKLLDDPSQSSELLSEAKKLNDSQAPK

SEQ ID NO: 1096 - protein, 58 aa, synthetic construct
  REGION 1..58: note = Engineered IL-1R-I binding polypeptide
VDAKYAKEVEYAQMEIFNLPNLTRKQYTAFIRKLFDDPSQSSELLSEAKKLNDSQAPK

SEQ ID NO: 1097 - protein, 58 aa, synthetic construct
  REGION 1..58: note = Engineered IL-1R-I binding polypeptide
VDAKYAKEVYAAQQEIFHLPNLTRKQYTAFIRKLFDDPSQSSELLSEAKKLNDSQAPK

SEQ ID NO: 1098 - protein, 58 aa, synthetic construct
  REGION 1..58: note = Engineered IL-1R-I binding polypeptide
VDAKYAKEAEQAYMEIFRLPNLTRKQYTAFIRKLLDDPSQSSELLSEAKKLNDSQAPK

SEQ ID NO: 1099 - protein, 58 aa, synthetic construct
  REGION 1..58: note = Engineered IL-1R-I binding polypeptide
VDAKYAKEVDVAYQEIFNLPNLTRKQYTAFIRKLLDDPSQSSELLSEAKKLNDSQAPK

SEQ ID NO: 1100 - protein, 58 aa, synthetic construct
  REGION 1..58: note = Engineered IL-1R-I binding polypeptide
VDAKYAKEVYHAQMEIFSLPNLTRKQYTAFIRKLFDDPSQSSELLSEAKKLNDSQAPK

SEQ ID NO: 1101 - protein, 58 aa, synthetic construct
  REGION 1..58: note = Engineered IL-1R-I binding polypeptide
VDAKYAKEAEDAQMEIYALPNLTRKQYTAFIRKLLDDPSQSSELLSEAKKLNDSQAPK

SEQ ID NO: 1102 - protein, 58 aa, synthetic construct
  REGION 1..58: note = Engineered IL-1R-I binding polypeptide
VDAKYAKEVQEAQMEIFELPNLTRKQYTAFIRKLLDDPSQSSELLSEAKKLNDSQAPK

SEQ ID NO: 1103 - protein, 58 aa, synthetic construct
  REGION 1..58: note = Engineered IL-1R-I binding polypeptide
VDAKYAKEHEFAYMEIYHLPNLTRKQYTAFIRKLLDDPSQSSELLSEAKKLNDSQAPK

SEQ ID NO: 1104 - protein, 58 aa, synthetic construct
  REGION 1..58: note = Engineered IL-1R-I binding polypeptide
VDAKYAKEAEEAYVEIFKLPNLTRKQYTAFIRKLLDDPSQSSELLSEAKKLNDSQAPK

SEQ ID NO: 1105 - protein, 58 aa, synthetic construct
  REGION 1..58: note = Engineered IL-1R-I binding polypeptide
VDAKYAKEIEKAQFEIYYLPNLTRKQYTAFIRKLLDDPSQSSELLSEAKKLNDSQAPK

SEQ ID NO: 1106 - protein, 58 aa, synthetic construct
  REGION 1..58: note = Engineered IL-1R-I binding polypeptide
VDAKYAKEVYKAQMEIFALPNLTRKQYTAFIRKLFDDPSQSSELLSEAKKLNDSQAPK

SEQ ID NO: 1107 - protein, 58 aa, synthetic construct
  REGION 1..58: note = Engineered IL-1R-I binding polypeptide
VDAKYAKEVEKAQMEIYYLPNLTRKQYTAFIRKLLDDPSQSSELLSEAKKLNDSQAPK

SEQ ID NO: 1108 - protein, 58 aa, synthetic construct
  REGION 1..58: note = Engineered IL-1R-I binding polypeptide
VDAKYAKEVEAAQLEIFELPNLTRKQYTAFIRKLLDDPSQSSELLSEAKKLNDSQAPK

SEQ ID NO: 1109 - protein, 58 aa, synthetic construct
  REGION 1..58: note = Engineered IL-1R-I binding polypeptide
VDAKYAKETYQAQMEIYSLPNLTRKQYTAFIRKLLDDPSQSSELLSEAKKLNDSQAPK

SEQ ID NO: 1110 - protein, 58 aa, synthetic construct
  REGION 1..58: note = Engineered IL-1R-I binding polypeptide
VDAKYAKELEDAYQEIFHLPNLTRKQYTAFIRKLLDDPSQSSELLSEAKKLNDSQAPK

SEQ ID NO: 1111 - protein, 58 aa, synthetic construct
  REGION 1..58: note = Engineered IL-1R-I binding polypeptide
VDAKYAKEVEEAQLEIFSLPNLTRKQYTAFIRKLLDDPSQSSELLSEAKKLNDSQAPK

SEQ ID NO: 1112 - protein, 58 aa, synthetic construct
  REGION 1..58: note = Engineered IL-1R-I binding polypeptide
VDAKYAKEIYLAQMEIFKLPNLTRRQYTAFIRKLLDDPSQSSELLSEAKKLNDSQAPK

SEQ ID NO: 1113 - protein, 58 aa, synthetic construct
  REGION 1..58: note = Engineered IL-1R-I binding polypeptide
VDAKYAKEIEEAQMEIFKLPNLTRKQYTAFIRKLLDDPSQSSELLSEAKKLNDSQAPK

SEQ ID NO: 1114 - protein, 58 aa, synthetic construct
  REGION 1..58: note = Engineered IL-1R-I binding polypeptide
VDAKYAKETEQAYMEIYQLPNLTRKQYTAFIRKLLDDPSQSSELLSEAKKLNDSQAPK

SEQ ID NO: 1115 - protein, 58 aa, synthetic construct
  REGION 1..58: note = Engineered IL-1R-I binding polypeptide
VDAKYAKEAEAAYYEIYHLPNLTRKQYTAFIRKLLDDPSQSSELLSEAKKLNDSQAPK

SEQ ID NO: 1116 - protein, 58 aa, synthetic construct
  REGION 1..58: note = Engineered IL-1R-I binding polypeptide
VDAKYAKETEAAYDEIYGLPNLTRKQYTAFIRKLLDDPSQSSELLSEAKKLNDSQAPK

SEQ ID NO: 1117 - protein, 58 aa, synthetic construct
  REGION 1..58: note = Engineered IL-1R-I binding polypeptide
VDAKYAKEVEEAYFEIFRLPNLTRKQYTAFIRKLLDDPSQSSELLSEAKKLNDSQAPK

SEQ ID NO: 1118 - protein, 58 aa, synthetic construct
  REGION 1..58: note = Engineered IL-1R-I binding polypeptide
VDAKYAKEVVKAYFEIYHLPNLTRRQYTAFIRKLLDDPSQSSELLSEAKKLNDSQAPK

SEQ ID NO: 1119 - protein, 58 aa, synthetic construct
  REGION 1..58: note = Engineered IL-1R-I binding polypeptide
VDAKYAKEVYEAQMEIFKLPNLTRKQYTAFIRKLLDDPSQSSELLSEAKKLNDSQAPK

SEQ ID NO: 1120 - protein, 58 aa, synthetic construct
  REGION 1..58: note = Engineered IL-1R-I binding polypeptide
VDAKYAKEVEDAYIEIYKLPNLTRKQYTAFIRKLLDDPSQSSELLSEAKKLNDSQAPK

SEQ ID NO: 1121 - protein, 58 aa, synthetic construct
  REGION 1..58: note = Engineered IL-1R-I binding polypeptide
VDAKYAKEVEWAQMEIFNLPNLTRRQYTAFIRKLLDDPSQSSELLSEAKKLNDSQAPK

SEQ ID NO: 1122 - protein, 58 aa, synthetic construct
  REGION 1..58: note = Engineered IL-1R-I binding polypeptide
VDAKYAKELEKAQMEIFYLPNLTRKQYTAFIRKLFDDPSQSSELLSEAKKLNDSQAPK

SEQ ID NO: 1123 - protein, 58 aa, synthetic construct
  REGION 1..58: note = Engineered IL-1R-I binding polypeptide
VDAKYAKETEEAYQEIFHLPNLTRKQYTAFIRKLLDDPSQSSELLSEAKKLNDSQAPK

SEQ ID NO: 1124 - protein, 58 aa, synthetic construct
  REGION 1..58: note = Engineered IL-1R-I binding polypeptide
VDAKYAKEAEDAQMEIFKLPNLTRKQYTAFIRKLLDDPSQSSELLSEAKKLNDSQAPK

SEQ ID NO: 1125 - protein, 58 aa, synthetic construct
  REGION 1..58: note = Engineered IL-1R-I binding polypeptide
VDAKYAKEIEEAQLEIFNLPNLTRKQYTAFIRKLLDDPSQSSELLSEAKKLNDSQAPK

SEQ ID NO: 1126 - protein, 58 aa, synthetic construct
  REGION 1..58: note = Engineered IL-1R-I binding polypeptide
VDAKYAKEVEDAYHEIFLLPNLTRKQYTAFIRKLLDDPSQSSELLSEAKKLNDSQAPK

SEQ ID NO: 1127 - protein, 58 aa, synthetic construct
  REGION 1..58: note = Engineered IL-1R-I binding polypeptide
VDAKYAKEVEYAYHEIFKLPNLTRKQYTAFIRKLLDDPSQSSELLSEAKKLNDSQAPK

SEQ ID NO: 1128 - protein, 58 aa, synthetic construct
  REGION 1..58: note = Engineered IL-1R-I binding polypeptide
VDAKYAKETVEAQMEIFNLPNLTRKQYTAFIRKLLDDPSQSSELLSEAKKLNDSQAPK

SEQ ID NO: 1129 - protein, 58 aa, synthetic construct
  REGION 1..58: note = Engineered IL-1R-I binding polypeptide
VDAKYAKEVEDAYMEIYFLPNLTRRQYTAFIRKLLDDPSQSSELLSEAKKLNDSQAPK

SEQ ID NO: 1130 - protein, 58 aa, synthetic construct
  REGION 1..58: note = Engineered IL-1R-I binding polypeptide
VDAKYAKETETAQMEIYNLPNLTRKQYTAFIIKLLDDPSQSSELLSEAKKLNDSQAPK

SEQ ID NO: 1131 - protein, 58 aa, synthetic construct
  REGION 1..58: note = Engineered IL-1R-I binding polypeptide
VDAKYAKEVEIAQMEIFRLPNLTRKQYTAFIRKLLDDPSQSSELLSEAKKLNDSQAPK

SEQ ID NO: 1132 - protein, 58 aa, synthetic construct
  REGION 1..58: note = Engineered IL-1R-I binding polypeptide
VDAKYAKEVHLAQMEIFSLPNLTRKQYTAFIRKLLDDPSQSSELLSEAKKLNDSQAPK

SEQ ID NO: 1133 - protein, 58 aa, synthetic construct
  REGION 1..58: note = Engineered IL-1R-I binding polypeptide
VDAKYAKEVEYAQMEIFSLPNLTRKQYTAFIRKLLDDPSQSSELLSEAKKLNDSQAPK

SEQ ID NO: 1134 - protein, 58 aa, synthetic construct
  REGION 1..58: note = Engineered IL-1R-I binding polypeptide
VDAKYAKEAEEAQHEIFSLPNLTRKQYTAFIRKLLDDPSQSSELLSEAKKLNDSQAPK

SEQ ID NO: 1135 - protein, 58 aa, synthetic construct
  REGION 1..58: note = Engineered IL-1R-I binding polypeptide
VDAKYAKEAYVAQMEIFSLPNLTRKQYTAFIRKLLDDPSQSSELLSEAKKLNDSQAPK

SEQ ID NO: 1136 - protein, 58 aa, synthetic construct
  REGION 1..58: note = Engineered IL-1R-I binding polypeptide
VDAKYAKEVQKAQMEIFELPNLTRKQYTAFIRKLFDDPSQSSELLSEAKKLNDSQAPK

SEQ ID NO: 1137 - protein, 58 aa, synthetic construct
  REGION 1..58: note = Engineered IL-1R-I binding polypeptide
VDAKYAKEAYAAQHEIFALPNLTRKQYTAFIRKLLDDPSQSSELLSEAKKLNDSQAPK

SEQ ID NO: 1138 - protein, 58 aa, synthetic construct
  REGION 1..58: note = Engineered IL-1R-I binding polypeptide
VDAKYAKEVERAYYEIYALPNLTRKQYTAFIRKLLDDPSQSSELLSEAKKLNDSQAPK

SEQ ID NO: 1139 - protein, 58 aa, synthetic construct
  REGION 1..58: note = Engineered IL-1R-I binding polypeptide
VDAKYAKEVEAAQMEIFELPNLTRKQYTAFIRKLLDDPSQSSELLSEAKKLNDSQAPK

SEQ ID NO: 1140 - protein, 58 aa, synthetic construct
  REGION 1..58: note = Engineered IL-1R-I binding polypeptide
VDAKYAKELENAQMEIFTLPNLTRKQYTAFIRKLLDDPSQSSELLSEAKKLNDSQAPK

SEQ ID NO: 1141 - protein, 58 aa, synthetic construct
  REGION 1..58: note = Engineered IL-1R-I binding polypeptide
VDAKYAKELEYAQQEIFHLPNLTRKQYTAFIRKLFDDPSQSSELLSEAKKLNDSQAPK

SEQ ID NO: 1142 - protein, 58 aa, synthetic construct
  REGION 1..58: note = Engineered IL-1R-I binding polypeptide
VDAKYAKEQLNAQMEIFSLPNLTRKQYTAFIRKLLDDPSQSSELLSEAKKLNDSQAPK

SEQ ID NO: 1143 - protein, 58 aa, synthetic construct
  REGION 1..58: note = Engineered IL-1R-I binding polypeptide
VDAKYAKEVIAAYYEIYDLPNLTRKQYTAFIRKLLDDPSQSSELLSEAKKLNDSQAPK

SEQ ID NO: 1144 - protein, 58 aa, synthetic construct
  REGION 1..58: note = Engineered IL-1R-I binding polypeptide
VDAKYAKEVVDAYWEIYSLPNLTRKQYTAFIRKLLDDPSQSSELLSEAKKLNDSQAPK

SEQ ID NO: 1145 - protein, 58 aa, synthetic construct
  REGION 1..58: note = Engineered IL-1R-I binding polypeptide
VDAKYAKEVEEAYQEIFRLPNLTRKQYTAFIRKLLDDPSQSSELLSEAKKLNDSQAPK

SEQ ID NO: 1146 - protein, 58 aa, synthetic construct
  REGION 1..58: note = Engineered IL-1R-I binding polypeptide
VDAKYAKEAEDAYFEIFALPNLTRKQYTAFIRKLLDDPSQSSELLSEAKKLNDSQAPK

SEQ ID NO: 1147 - protein, 58 aa, synthetic construct
  REGION 1..58: note = Engineered IL-1R-I binding polypeptide
VDAKYAKEVEDAYFEIYRLPNLTRKQYTAFIRKLLDDPSQSSELLSEAKKLNDSQAPK

SEQ ID NO: 1148 - protein, 58 aa, synthetic construct
  REGION 1..58: note = Engineered IL-1R-I binding polypeptide
VDAKYAKEVEVAYYEIYRLPNLTRKQYTAFIRKLLDDPSQSSELLSEAKKLNDSQAPK

SEQ ID NO: 1149 - protein, 58 aa, synthetic construct
  REGION 1..58: note = Engineered IL-1R-I binding polypeptide
VDAKYAKELEDAYMEIFKLPNLTRKQYTAFIRKLLDDPSQSSELLSEAKKLNDSQAPK

SEQ ID NO: 1150 - protein, 58 aa, synthetic construct
  REGION 1..58: note = Engineered IL-1R-I binding polypeptide
VDAKYAKEVDEAYWEIYALPNLTRKQYTAFIRKLLDDPSQSSELLSEAKKLNDSQAPK

SEQ ID NO: 1151 - protein, 58 aa, synthetic construct
  REGION 1..58: note = Engineered IL-1R-I binding polypeptide
VDAKYAKEAEWAYWEIYKLPNLTRKQYTAFIRKLLDDPSQSSELLSEAKKLNDSQAPK

SEQ ID NO: 1152 - protein, 58 aa, synthetic construct
  REGION 1..58: note = Engineered IL-1R-I binding polypeptide
VDAKYAKEVEVAYMEIFHLPNLTRKQYTAFIRKLLDDPSQSSELLSEAKKLNDSQAPK

SEQ ID NO: 1153 - protein, 58 aa, synthetic construct
  REGION 1..58: note = Engineered IL-1R-I binding polypeptide
VDAKYAKETERAYMEIYHLPNLTRKQYTAFIRKLLDDPSQSSELLSEAKKLNDSQAPK

SEQ ID NO: 1154 - protein, 58 aa, synthetic construct
  REGION 1..58: note = Engineered IL-1R-I binding polypeptide
VDAKYAKEHIAAYFEIYELPNLTRKQYTAFIRKLLDDPSQSSELLSEAKKLNDSQAPK

SEQ ID NO: 1155 - protein, 58 aa, synthetic construct
  REGION 1..58: note = Engineered IL-1R-I binding polypeptide
VDAKYAKEVEEAYYEIFGLPNLTRKQYTAFIRKLLDDPSQSSELLSEAKKLNDSQAPK

SEQ ID NO: 1156 - protein, 58 aa, synthetic construct
  REGION 1..58: note = Engineered IL-1R-I binding polypeptide
VDAKYAKEVEDAYQEIYQLPNLTRKQYTAFIRKLLDDPSQSSELLSEAKKLNDSQAPK

SEQ ID NO: 1157 - protein, 58 aa, synthetic construct
  REGION 1..58: note = Engineered IL-1R-I binding polypeptide
VDAKYAKETVEAYYEIYRLPNLTRKQYTAFIRKLLDDPSQSSELLSEAKKLNDSQAPK

SEQ ID NO: 1158 - protein, 58 aa, synthetic construct
  REGION 1..58: note = Engineered IL-1R-I binding polypeptide
VDAKYAKEVEQAYYEIYALPNLTRKQYTAFIRKLLDDPSQSSELLSEAKKLNDSQAPK

SEQ ID NO: 1159 - protein, 58 aa, synthetic construct
  REGION 1..58: note = Engineered IL-1R-I binding polypeptide
VDAKYAKEVVEAYDEIFALPNLTRKQYTAFIRKLLDDPSQSSELLSEAKKLNDSQAPK

SEQ ID NO: 1160 - protein, 58 aa, synthetic construct
  REGION 1..58: note = Engineered IL-1R-I binding polypeptide
VDAKYAKEVEEAYMEIYGLPNLTRKQYTAFIRKLLDDPSQSSELLSEAKKLNDSQAPK

SEQ ID NO: 1161 - protein, 58 aa, synthetic construct
  REGION 1..58: note = Engineered IL-1R-I binding polypeptide
VDAKYAKEVDDAYMEIFRLPNLTRKQYTAFIRKLLDDPSQSSELLSEAKKLNDSQAPK

SEQ ID NO: 1162 - protein, 58 aa, synthetic construct
  REGION 1..58: note = Engineered IL-1R-I binding polypeptide
VDAKYAKEVQDAYMEIYGLPNLTRKQYTAFIRKLLDDPSQSSELLSEAKKLNDSQAPK

SEQ ID NO: 1163 - protein, 58 aa, synthetic construct
  REGION 1..58: note = Engineered IL-1R-I binding polypeptide
VDAKYAKEAQQAYDEIFQLPNLTRKQYTAFIRKLLDDPSQSSELLSEAKKLNDSQAPK

SEQ ID NO: 1164 - protein, 58 aa, synthetic construct
  REGION 1..58: note = Engineered IL-1R-I binding polypeptide
VDAKYAKEVEFAYMEIYRLPNLTRKQYTAFIRKLLDDPSQSSELLSEAKKLNDSQAPK

SEQ ID NO: 1165 - protein, 58 aa, synthetic construct
  REGION 1..58: note = Engineered IL-1R-I binding polypeptide
VDAKYAKEVEIAYFEIYQLPNLTRKQYTAFIRKLLDDPSQSSELLSEAKKLNDSQAPK

SEQ ID NO: 1166 - protein, 58 aa, synthetic construct
  REGION 1..58: note = Engineered IL-1R-I binding polypeptide
VDAKYAKETEKAYFEIFGLPNLTRKQYTAFIRKLLDDPSQSSELLSEAKKLNDSQAPK

SEQ ID NO: 1167 - protein, 58 aa, synthetic construct
  REGION 1..58: note = Engineered IL-1R-I binding polypeptide
VDAKYAKEVTNAYMEIYELPNLTRKQYTAFIRKLLDDPSQSSELLSEAKKLNDSQAPK

SEQ ID NO: 1168 - protein, 58 aa, synthetic construct
  REGION 1..58: note = Engineered IL-1R-I binding polypeptide
VDAKYAKETEAAYFEIFKLPNLTRKQYTAFIRKLLDDPSQSSELLSEAKKLNDSQAPK

SEQ ID NO: 1169 - protein, 58 aa, synthetic construct
  REGION 1..58: note = Engineered IL-1R-I binding polypeptide
VDAKYAKEVETAYMEIYALPNLTRKQYTAFIRKLLDDPSQSSELLSEAKKLNDSQAPK

SEQ ID NO: 1170 - protein, 58 aa, synthetic construct
  REGION 1..58: note = Engineered IL-1R-I binding polypeptide
VDAKYAKEAEDAYMEIYKLPNLTRKQYTAFIRKLLDDPSQSSELLSEAKKLNDSQAPK

SEQ ID NO: 1171 - protein, 58 aa, synthetic construct
  REGION 1..58: note = Engineered IL-1R-I binding polypeptide
VDAKYAKEVEEAYQEIFHLPNLTRKQYTAFIRKLLDDPSQSSELLSEAKKLNDSQAPK

SEQ ID NO: 1172 - protein, 58 aa, synthetic construct
  REGION 1..58: note = Engineered IL-1R-I binding polypeptide
VDAKYAKETEEAYFEIYRLPNLTRKQYTAFIRKLLDDPSQSSELLSEAKKLNDSQAPK

SEQ ID NO: 1173 - protein, 58 aa, synthetic construct
  REGION 1..58: note = Engineered IL-1R-I binding polypeptide
VDAKYAKEAISAYWEIFALPNLTRKQYTAFIRKLLDDPSQSSELLSEAKKLNDSQAPK

SEQ ID NO: 1174 - protein, 58 aa, synthetic construct
  REGION 1..58: note = Engineered IL-1R-I binding polypeptide
VDAKYAKEVEEAYQEIYRLPNLTRKQYTAFIRKLLDDPSQSSELLSEAKKLNDSQAPK

SEQ ID NO: 1175 - protein, 58 aa, synthetic construct
  REGION 1..58: note = Engineered IL-1R-I binding polypeptide
VDAKYAKEVVYAQHEIFYLPNLTRKQYTAFIRKLLDDPSQSSELLSEAKKLNDSQAPK

SEQ ID NO: 1176 - protein, 58 aa, synthetic construct
  REGION 1..58: note = Engineered IL-1R-I binding polypeptide
VDAKYAKEIEVAYMEIYHLPNLTRKQYTAFIRKLLDDPSQSSELLSEAKKLNDSQAPK

SEQ ID NO: 1177 - protein, 58 aa, synthetic construct
  REGION 1..58: note = Engineered IL-1R-I binding polypeptide
VDAKYAKEVEYAYYEIFGLPNLTRKQYTAFIRKLLDDPSQSSELLSEAKKLNDSQAPK

SEQ ID NO: 1178 - protein, 58 aa, synthetic construct
  REGION 1..58: note = Engineered IL-1R-I binding polypeptide
VDAKYAKEVEQAYMEIFHLPNLTRKQYTAFIRKLLDDPSQSSELLSEAKKLNDSQAPK

SEQ ID NO: 1179 - protein, 58 aa, synthetic construct
  REGION 1..58: note = Engineered IL-1R-I binding polypeptide
VDAKYAKEVEDAYDEIYQLPNLTRKQYTAFIRKLLDDPSQSSELLSEAKKLNDSQAPK

SEQ ID NO: 1180 - protein, 58 aa, synthetic construct
  REGION 1..58: note = Engineered IL-1R-I binding polypeptide
VDAKYAKEIERAYYEIYDLPNLTRKQYTAFIRKLLDDPSQSSELLSEAKKLNDSQAPK

SEQ ID NO: 1181 - protein, 58 aa, synthetic construct
  REGION 1..58: note = Engineered IL-1R-I binding polypeptide
VDAKYAKEVEDAYFEIYYLPNLTRKQYTAFIRKLLDDPSQSSELLSEAKKLNDSQAPK

SEQ ID NO: 1182 - protein, 58 aa, synthetic construct
  REGION 1..58: note = Engineered IL-1R-I binding polypeptide
VDAKYAKEVEQAYWEIYALPNLTRKQYTAFIRKLLDDPSQSSELLSEAKKLNDSQAPK

SEQ ID NO: 1183 - protein, 58 aa, synthetic construct
  REGION 1..58: note = Engineered IL-1R-I binding polypeptide
VDAKYAKEVEEAYQEIFKLPNLTRKQYTAFIRKLLDDPSQSSELLSEAKKLNDSQAPK

SEQ ID NO: 1184 - protein, 58 aa, synthetic construct
  REGION 1..58: note = Engineered IL-1R-I binding polypeptide
VDAKYAKEAEHAYWEIYALPNLTRKQYTAFIRKLLDDPSQSSELLSEAKKLNDSQAPK

SEQ ID NO: 1185 - protein, 58 aa, synthetic construct
  REGION 1..58: note = Engineered IL-1R-I binding polypeptide
VDAKYAKEVEKAYYEIYNLPNLTRKQYTAFIRKLLDDPSQSSELLSEAKKLNDSQAPK

SEQ ID NO: 1186 - protein, 58 aa, synthetic construct
  REGION 1..58: note = Engineered IL-1R-I binding polypeptide
VDAKYAKEVEEAYMEIYKLPNLTRKQYTAFIRKLLDDPSQSSELLSEAKKLNDSQAPK

SEQ ID NO: 1187 - protein, 58 aa, synthetic construct
  REGION 1..58: note = Engineered IL-1R-I binding polypeptide
VDAKYAKEIEDAYQEIYELPNLTRKQYTAFIRKLLDDPSQSSELLSEAKKLNDSQAPK

SEQ ID NO: 1188 - protein, 58 aa, synthetic construct
  REGION 1..58: note = Engineered IL-1R-I binding polypeptide
VDAKYAKEVENAYYEIFDLPNLTRKQYTAFIRKLLDDPSQSSELLSEAKKLNDSQAPK

SEQ ID NO: 1189 - protein, 58 aa, synthetic construct
  REGION 1..58: note = Engineered IL-1R-I binding polypeptide
VDAKYAKEATEAYWEIYQLPNLTRKQYTAFIRKLLDDPSQSSELLSEAKKLNDSQAPK

SEQ ID NO: 1190 - protein, 58 aa, synthetic construct
  REGION 1..58: note = Engineered IL-1R-I binding polypeptide
VDAKYAKEADAAYFEIYHLPNLTRKQYTAFIRKLLDDPSQSSELLSEAKKLNDSQAPK

SEQ ID NO: 1191 - protein, 58 aa, synthetic construct
  REGION 1..58: note = Engineered IL-1R-I binding polypeptide
VDAKYAKEVINAYWEIYALPNLTRKQYTAFIRKLLDDPSQSSELLSEAKKLNDSQAPK

SEQ ID NO: 1192 - protein, 58 aa, synthetic construct
  REGION 1..58: note = Engineered IL-1R-I binding polypeptide
VDAKYAKEAVDAYWEIFALPNLTRKQYTAFIRKLLDDPSQSSELLSEAKKLNDSQAPK

SEQ ID NO: 1193 - protein, 58 aa, synthetic construct
  REGION 1..58: note = Engineered IL-1R-I binding polypeptide
VDAKYAKEVEEAYYEIYELPNLTRKQYTAFIRKLLDDPSQSSELLSEAKKLNDSQAPK

SEQ ID NO: 1194 - protein, 58 aa, synthetic construct
  REGION 1..58: note = Engineered IL-1R-I binding polypeptide
VDAKYAKEVEYAYFEIYSLPNLTRKQYTAFIRKLLDDPSQSSELLSEAKKLNDSQAPK

SEQ ID NO: 1195 - protein, 58 aa, synthetic construct
  REGION 1..58: note = Engineered IL-1R-I binding polypeptide
VDAKYAKEAEKAYYEIFNLPNLTRKQYTAFIRKLLDDPSQSSELLSEAKKLNDSQAPK

SEQ ID NO: 1196 - protein, 58 aa, synthetic construct
  REGION 1..58: note = Engineered IL-1R-I binding polypeptide
VDAKYAKETIDAYYEIYGLPNLTRKQYTAFIRKLLDDPSQSSELLSEAKKLNDSQAPK

SEQ ID NO: 1197 - protein, 58 aa, synthetic construct
  REGION 1..58: note = Engineered IL-1R-I binding polypeptide
VDAKYAKEVEVAYAEIFNLPNLTRKQYTAFIRKLLDDPSQSSELLSEAKKLNDSQAPK

SEQ ID NO: 1198 - protein, 58 aa, synthetic construct
  REGION 1..58: note = Engineered IL-1R-I binding polypeptide
VDAKYAKEVETAYFEIYALPNLTRKQYTAFIRKLLDDPSQSSELLSEAKKLNDSQAPK

SEQ ID NO: 1199 - protein, 58 aa, synthetic construct
  REGION 1..58: note = Engineered IL-1R-I binding polypeptide
VDAKYAKEAYIAQMEIFGLPNLTRKQYTAFIRKLLDDPSQSSELLSEAKKLNDSQAPK

SEQ ID NO: 1200 - protein, 58 aa, synthetic construct
  REGION 1..58: note = Engineered IL-1R-I binding polypeptide
VDAKYAKEVEEAYFEIYNLPNLTRRQYTAFIRKLLDDPSQSSELLSEAKKLNDSQAPK

SEQ ID NO: 1201 - protein, 58 aa, synthetic construct
  REGION 1..58: note = Engineered IL-1R-I binding polypeptide
VDAKYAKESEAAYWEIYELPNLTRKQYTAFIRKLLDDPSQSSELLSEAKKLNDSQAPK

SEQ ID NO: 1202 - protein, 58 aa, synthetic construct
  REGION 1..58: note = Engineered IL-1R-I binding polypeptide
VDAKYAKEAEDAYWEIFALPNLTRKQYTAFIRKLLDDPSQSSELLSEAKKLNDSQAPK

SEQ ID NO: 1203 - protein, 58 aa, synthetic construct
  REGION 1..58: note = Engineered IL-1R-I binding polypeptide
VDAKYAKEVDAAYWEIYGLPNLTRKQYTAFIRKLLDDPSQSSELLSEAKKLNDSQAPK

SEQ ID NO: 1204 - protein, 58 aa, synthetic construct
  REGION 1..58: note = Engineered IL-1R-I binding polypeptide
VDAKYAKETVDAYYEIYELPNLTRKQYTAFIRKLLDDPSQSSELLSEAKKLNDSQAPK

SEQ ID NO: 1205 - protein, 58 aa, synthetic construct
  REGION 1..58: note = Engineered IL-1R-I binding polypeptide
VDAKYAKEIEAVQMEIFYLPNLTRKQYTAFIRKLFDDPSQSSELLSEAKKLNDSQAPK

SEQ ID NO: 1206 - protein, 58 aa, synthetic construct
  REGION 1..58: note = Engineered IL-1R-I binding polypeptide
VDAKYAKEIEAAQMEIFGLPNLTRKQYTAFIRKLFDDPSQSSELLSEAKKLNDSQAPK

SEQ ID NO: 1207 - protein, 58 aa, synthetic construct
  REGION 1..58: note = Engineered IL-1R-I binding polypeptide
VDAKYAKEVEEAQMEIFILPNLTRKQYTAFIRKLLDDPSQSSELLSEAKKLNDSQAPK

SEQ ID NO: 1208 - protein, 58 aa, synthetic construct
  REGION 1..58: note = Engineered IL-1R-I binding polypeptide
VDAKYAKEVTVAQMEIFALPNLTRKQYTAFIRKLLDDPSQSSELLSEAKKLNDSQAPK

SEQ ID NO: 1209 - protein, 58 aa, synthetic construct
  REGION 1..58: note = Engineered IL-1R-I binding polypeptide
VDAKYAKEVETAQMEIFVLPNLTRKQYTAFIRKLLDDPSQSSELLSEAKKLNDSQAPK

SEQ ID NO: 1210 - protein, 58 aa, synthetic construct
  REGION 1..58: note = Engineered IL-1R-I binding polypeptide
VDAKYAKEAEDAYWEIYALPNLTRKQYTAFIRKLLDDPSQSSELLSEAKKLNDSQAPK

SEQ ID NO: 1211 - protein, 58 aa, synthetic construct
  REGION 1..58: note = Engineered IL-1R-I binding polypeptide
VDAKYAKEAIEAYWEIYALPNLTRKQYTAFIRKLLDDPSQSSELLSEAKKLNDSQAPK

SEQ ID NO: 1212 - protein, 58 aa, synthetic construct
  REGION 1..58: note = Engineered IL-1R-I binding polypeptide
VDAKYAKEVVAAYYEIFELPNLTRKQYTAFIRKLLDDPSQSSELLSEAKKLNDSQAPK

SEQ ID NO: 1213 - protein, 58 aa, synthetic construct
  REGION 1..58: note = Engineered IL-1R-I binding polypeptide
VDAKYAKEVVSAYYEIYELPNLTRKQYTAFIRKLLDDPSQSSELLSEAKKLNDSQAPK

SEQ ID NO: 1214 - protein, 58 aa, synthetic construct
  REGION 1..58: note = Engineered IL-1R-I binding polypeptide
VDAKYAKEIEIAYMEIFHLPNLTRKQYTAFIRKLLDDPSQSSELLSEAKKLNDSQAPK

SEQ ID NO: 1215 - protein, 58 aa, synthetic construct
  REGION 1..58: note = Engineered IL-1R-I binding polypeptide
VDAKYAKELDVAYMEIYRLPNLTRKQYTAFIRKLLDDPSQSSELLSEAKKLNDSQAPK

SEQ ID NO: 1216 - protein, 58 aa, synthetic construct
  REGION 1..58: note = Engineered IL-1R-I binding polypeptide
VDAKYAKEAEVAYMEIYRLPNLTRKQYTAFIRKLLDDPSQSSELLSEAKKLNDSQAPK

SEQ ID NO: 1217 - protein, 58 aa, synthetic construct
  REGION 1..58: note = Engineered IL-1R-I binding polypeptide
VDAKYAKELERAYYEIYGLPNLTRKQYTAFIRKLLDDPSQSSELLSEAKKLNDSQAPK

SEQ ID NO: 1218 - protein, 58 aa, synthetic construct
  REGION 1..58: note = Engineered IL-1R-I binding polypeptide
VDAKYAKEAEIAYYEIYSLPNLTRKQYTAFIRKLLDDPSQSSELLSEAKKLNDSQAPK

SEQ ID NO: 1219 - protein, 58 aa, synthetic construct
  REGION 1..58: note = Engineered IL-1R-I binding polypeptide
VDAKYAKETEVAYYEIYALPNLTRKQYTAFIRKLLDDPSQSSELLSEAKKLNDSQAPK

SEQ ID NO: 1220 - protein, 58 aa, synthetic construct
  REGION 1..58: note = Engineered IL-1R-I binding polypeptide
VDAKYAKEVEAAYWEIYALPNLTRKQYTAFIRKLLDDPSQSSELLSEAKKLNDSQAPK

SEQ ID NO: 1221 - protein, 58 aa, synthetic construct
  REGION 1..58: note = Engineered IL-1R-I binding polypeptide
VDAKYAKEVEIAYMEIYNLPNLTRKQYTAFIRKLLDDPSQSSELLSEAKKLNDSQAPK

SEQ ID NO: 1222 - protein, 58 aa, synthetic construct
  REGION 1..58: note = Engineered IL-1R-I binding polypeptide
VDAKYAKEVEVAYFEIYNLPNLTRKQYTAFIRKLLDDPSQSSELLSEAKKLNDSQAPK

SEQ ID NO: 1223 - protein, 58 aa, synthetic construct
  REGION 1..58: note = Engineered IL-1R-I binding polypeptide
VDAKYAKEHEEAYMEIYHLPNLTRKQYTAFIRKLLDDPSQSSELLSEAKKLNDSQAPK

SEQ ID NO: 1224 - protein, 58 aa, synthetic construct
  REGION 1..58: note = Engineered IL-1R-I binding polypeptide
VDAKYAKELERAYMEIYHLPNLTRKQYTAFIRKLLDDPSQSSELLSEAKKLNDSQAPK

SEQ ID NO: 1225 - protein, 58 aa, synthetic construct
  REGION 1..58: note = Engineered IL-1R-I binding polypeptide
VDAKYAKEVEHAYMEIYHLPNLTRKQYTAFIRKLLDDPSQSSELLSEAKKLNDSQAPK

SEQ ID NO: 1226 - protein, 58 aa, synthetic construct
  REGION 1..58: note = Engineered IL-1R-I binding polypeptide
VDAKYAKEVQEAYMEIFALPNLTRRQYTAFIRKLLDDPSQSSELLSEAKKLNDSQAPK

SEQ ID NO: 1227 - protein, 58 aa, synthetic construct
  REGION 1..58: note = Engineered IL-1R-I binding polypeptide
VDAKYAKEVKIAQMEIFNLPNLTRKQYTAFIRKLFDDPSQSSELLSEAKKLNDSQAPK

SEQ ID NO: 1228 - protein, 58 aa, synthetic construct
  REGION 1..58: note = Engineered IL-1R-I binding polypeptide
VDAKYAKEVEWAQMEIFDLPNLTRKQYTAFIRKLLDDPSQSSELLSEAKKLNDSQAPK

SEQ ID NO: 1229 - protein, 58 aa, synthetic construct
  REGION 1..58: note = Engineered IL-1R-I binding polypeptide
VDAKYAKEAHSAQMEIFALPNLTRKQYTAFIRKLLDDPSQSSELLSEAKKLNDSQAPK

SEQ ID NO: 1230 - protein, 58 aa, synthetic construct
  REGION 1..58: note = Engineered IL-1R-I binding polypeptide
VDAKYAKEAERAQMEIFALPNLTRKQYTAFIRKLLDDPSQSSELLSEAKKLNDSQAPK

SEQ ID NO: 1231 - protein, 58 aa, synthetic construct
  REGION 1..58: note = Engineered IL-1R-I binding polypeptide
VDAKYAKETEAAQMEIYKLPNLTRKQYTAFIRKLLDDPSQSSELLSEAKKLNDSQAPK

SEQ ID NO: 1232 - protein, 58 aa, synthetic construct
  REGION 1..58: note = Engineered IL-1R-I binding polypeptide
VDAKYAKELEQAQMEIFYLPNLTRKQYTAFIRKLFDDPSQSSELLSEAKKLNDSQAPK

SEQ ID NO: 1233 - protein, 58 aa, synthetic construct
  REGION 1..58: note = Engineered IL-1R-I binding polypeptide
VDAKYAKEVESAQMEIFELPNLTRKQYTAFIRKLLDDPSQSSELLSEAKKLNDSQAPK

SEQ ID NO: 1234 - protein, 58 aa, synthetic construct
  REGION 1..58: note = Engineered IL-1R-I binding polypeptide
VDAKYAKEVEDAQMEIYQLPNLTRRQYTAFIRKLLDDPSQSSELLSEAKKLNDSQAPK

SEQ ID NO: 1235 - protein, 58 aa, synthetic construct
  REGION 1..58: note = Engineered IL-1R-I binding polypeptide
VDAKYAKEIEDAQMEIYDLPNLTRRQYTAFIRKLLDDPSQSSELLSEAKKLNDSQAPK

SEQ ID NO: 1236 - protein, 58 aa, synthetic construct
  REGION 1..58: note = Engineered IL-1R-I binding polypeptide
VDAKYAKEVEQAQMEIFKLPNLTRKQYTAFIRKLLDDPSQSSELLSEAKKLNDSQAPK

SEQ ID NO: 1237 - protein, 58 aa, synthetic construct
  REGION 1..58: note = Engineered IL-1R-I binding polypeptide
VDAKYAKEVEHAQMEIYSLPNLTRKQYTAFIRKLLDDPSQSSELLSEAKKLNDSQAPK

SEQ ID NO: 1238 - protein, 58 aa, synthetic construct
  REGION 1..58: note = Engineered IL-1R-I binding polypeptide
VDAKYAKEVEKAQMEIFSLPNLTRKQYTAFIRKLFDDPSQSSELLSEAKKLNDSQAPK

SEQ ID NO: 1239 - protein, 58 aa, synthetic construct
  REGION 1..58: note = Engineered IL-1R-I binding polypeptide
VDAKYAKEIEDAQMEIFSLPNLTRKQYTAFIRKLLDDPSQSSELLSEAKKLNDSQAPK

SEQ ID NO: 1240 - protein, 58 aa, synthetic construct
  REGION 1..58: note = Engineered IL-1R-I binding polypeptide
VDAKYAKEVEEAQMEIYGLPNLTRKQYTAFIRKLLDDPSQSSELLSEAKKLNDSQAPK

SEQ ID NO: 1241 - protein, 58 aa, synthetic construct
  REGION 1..58: note = Engineered IL-1R-I binding polypeptide
VDAKYAKEIEKAQMEIFALPNLTRRQYTAFIRKLLDDPSQSSELLSEAKKLNDSQAPK

SEQ ID NO: 1242 - protein, 58 aa, synthetic construct
  REGION 1..58: note = Engineered IL-1R-I binding polypeptide
VDAKYAKETYVAQMEIFALPNLTRKQYTAFIRKLLDDPSQSSELLSEAKKLNDSQAPK

SEQ ID NO: 1243 - protein, 58 aa, synthetic construct
  REGION 1..58: note = Engineered IL-1R-I binding polypeptide
VDAKYAKEVEIAQMEIFYLPNLTRKQYTAFIRKLLDDPSQSSELLSEAKKLNDSQAPK

SEQ ID NO: 1244 - protein, 58 aa, synthetic construct
  REGION 1..58: note = Engineered IL-1R-I binding polypeptide
VDAKYAKEVKVAQMEIFALPNLTRKQYTAFIRKLLDDPSQSSELLSEAKKLNDSQAPK

SEQ ID NO: 1245 - protein, 58 aa, synthetic construct
  REGION 1..58: note = Engineered IL-1R-I binding polypeptide
VDAKYAKEVEYAQMEIFALPNLTRKQYTAFIRKLFDDPSQSSELLSEAKKLNDSQAPK

SEQ ID NO: 1246 - protein, 58 aa, synthetic construct
  REGION 1..58: note = Engineered IL-1R-I binding polypeptide
VDAKYAKEVETAQMEIFYLPNLTRKQYTAFIRKLLDDPSQSSELLSEAKKLNDSQAPK

SEQ ID NO: 1247 - protein, 58 aa, synthetic construct
  REGION 1..58: note = Engineered IL-1R-I binding polypeptide
VDAKYAKEVEAAQMEIFKLPNLTRKQYTAFIRKLLDDPSQSSELLSEAKKLNDSQAPK

SEQ ID NO: 1248 - protein, 58 aa, synthetic construct
  REGION 1..58: note = Engineered IL-1R-I binding polypeptide
VDAKYAKEIEAAQMEIFGLPNLTRKQYTAFIRKLLDDPSQSSELLSEAKKLNDSQAPK

SEQ ID NO: 1249 - protein, 58 aa, synthetic construct
  REGION 1..58: note = Engineered IL-1R-I binding polypeptide
VDAKYAKETEAAQMEIYALPNLTRKQYTAFIRKLFDDPSQSSELLSEAKKLNDSQAPK

SEQ ID NO: 1250 - protein, 58 aa, synthetic construct
  REGION 1..58: note = Engineered IL-1R-I binding polypeptide
VDAKYAKEIETIQHEIYELPNLTRKQYTAFIRKLLDDPSQSSELLSEAKKLNDSQAPK

SEQ ID NO: 1251 - protein, 58 aa, synthetic construct
  REGION 1..58: note = Engineered IL-1R-I binding polypeptide
VDAKYAKETEEIQMEIFHLPNLTRKQYTAFIRKLLDDPSQSSELLSEAKKLNDSQAPK

SEQ ID NO: 1252 - protein, 58 aa, synthetic construct
  REGION 1..58: note = Engineered IL-1R-I binding polypeptide
VDAKYAKEVEEIQMEIFRLPNLTRRQYTAFIRKLLDDPSQSSELLSEAKKLNDSQAPK

SEQ ID NO: 1253 - protein, 58 aa, synthetic construct
  REGION 1..58: note = Engineered IL-1R-I binding polypeptide
VDAKYAKEVEEVYFEIFRLPNLTRKQYTAFIRKLLDDPSQSSELLSEAKKLNDSQAPK

SEQ ID NO: 1254 - protein, 58 aa, synthetic construct
  REGION 1..58: note = Engineered IL-1R-I binding polypeptide
VDAKYAKETYEVQMEIYHLPNLTRKQYTAFIRKLLDDPSQSSELLSEAKKLNDSQAPK

SEQ ID NO: 1255 - protein, 58 aa, synthetic construct
  REGION 1..58: note = Engineered IL-1R-I binding polypeptide
VDAKYAKEAERVQMEIFGLPNLTRKQYTAFIRKLLDDPSQSSELLSEAKKLNDSQAPK

SEQ ID NO: 1256 - protein, 58 aa, synthetic construct
  REGION 1..58: note = Engineered IL-1R-I binding polypeptide
VDAKYAKEAEAIQMEIYDLPNLTRRQYTAFIRKLLDDPSQSSELLSEAKKLNDSQAPK

SEQ ID NO: 1257 - protein, 58 aa, synthetic construct
  REGION 1..58: note = Engineered IL-1R-I binding polypeptide
VDAKYAKETEVIQMEIFRLPNLTRRQYTAFIRKLLDDPSQSSELLSEAKKLNDSQAPK

SEQ ID NO: 1258 - protein, 58 aa, synthetic construct
  REGION 1..58: note = Engineered IL-1R-I binding polypeptide
VDAKYAKETEAIQMEIFQLPNLTRKQYTAFIRKLFDDPSQSSELLSEAKKLNDSQAPK

SEQ ID NO: 1259 - protein, 58 aa, synthetic construct
  REGION 1..58: note = Engineered IL-1R-I binding polypeptide
VDAKYAKETEAIQMEIFRLPNLTRKQYTAFIRKLLDDPSQSSELLSEAKKLNDSQAPK

SEQ ID NO: 1260 - protein, 58 aa, synthetic construct
  REGION 1..58: note = Engineered IL-1R-I binding polypeptide
VDAKYAKETEAVQMEIFRLPNLTRKQYTAFIRKLLDDPSQSSELLSEAKKLNDSQAPK

SEQ ID NO: 1261 - protein, 58 aa, synthetic construct
  REGION 1..58: note = Engineered IL-1R-I binding polypeptide
VDAKYAKETEAVQMEIFRLPNLTRRQYTAFIRKLLDDPSQSSELLSEAKKLNDSQAPK

SEQ ID NO: 1262 - protein, 58 aa, synthetic construct
  REGION 1..58: note = Engineered IL-1R-I binding polypeptide
VDAKYAKETEAVQMEIFTLPNLTRRQYTAFIRKLLDDPSQSSELLSEAKKLNDSQAPK

SEQ ID NO: 1263 - protein, 58 aa, synthetic construct
  REGION 1..58: note = Engineered IL-1R-I binding polypeptide
VDAKYAKETEAIQMEIFELPNLTRRQYTAFIRKLLDDPSQSSELLSEAKKLNDSQAPK

SEQ ID NO: 1264 - protein, 58 aa, synthetic construct
  REGION 1..58: note = Engineered IL-1R-I binding polypeptide
VDAKYAKETEAVQMEIFHLPNLTRRQYTAFIRKLLDDPSQSSELLSEAKKLNDSQAPK

SEQ ID NO: 1265 - protein, 58 aa, synthetic construct
  REGION 1..58: note = Engineered IL-1R-I binding polypeptide
VDAKYAKETEEIQMEIFLLPNLTRKQYTAFIRKLFDDPSQSSELLSEAKKLNDSQAPK

SEQ ID NO: 1266 - protein, 58 aa, synthetic construct
  REGION 1..58: note = Engineered IL-1R-I binding polypeptide
VDAKYAKETERVQMEIFYLPNLTRRQYTAFIRKLLDDPSQSSELLSEAKKLNDSQAPK

SEQ ID NO: 1267 - protein, 58 aa, synthetic construct
  REGION 1..58: note = Engineered IL-1R-I binding polypeptide
VDAKYAKETERVQMEIFQLPNLTRKQYTAFIRKLLDDPSQSSELLSEAKKLNDSQAPK

SEQ ID NO: 1268 - protein, 58 aa, synthetic construct
  REGION 1..58: note = Engineered IL-1R-I binding polypeptide
VDAKYAKETEEIQMEIFQLPNLTRRQYTAFIRKLLDDPSQSSELLSEAKKLNDSQAPK

SEQ ID NO: 1269 - protein, 58 aa, synthetic construct
  REGION 1..58: note = Engineered IL-1R-I binding polypeptide
VDAKYAKETEEVQMEIFKLPNLTRRQYTAFIRKLLDDPSQSSELLSEAKKLNDSQAPK

SEQ ID NO: 1270 - protein, 58 aa, synthetic construct
  REGION 1..58: note = Engineered IL-1R-I binding polypeptide
VDAKYAKETEEIQMEIFRLPNLTRRQYTAFIRKLLDDPSQSSELLSEAKKLNDSQAPK

SEQ ID NO: 1271 - protein, 58 aa, synthetic construct
  REGION 1..58: note = Engineered IL-1R-I binding polypeptide
VDAKYAKETEEIQMEIFRLPNLTRKQYTAFIRKLLDDPSQSSELLSEAKKLNDSQAPK

SEQ ID NO: 1272 - protein, 58 aa, synthetic construct
  REGION 1..58: note = Engineered IL-1R-I binding polypeptide
VDAKYAKETEEVQMEIFRLPNLTRKQYTAFIRKLLDDPSQSSELLSEAKKLNDSQAPK

SEQ ID NO: 1273 - protein, 58 aa, synthetic construct
  REGION 1..58: note = Engineered IL-1R-I binding polypeptide
VDAKYAKETEQVQMEIFHLPNLTRKQYTAFIRKLLDDPSQSSELLSEAKKLNDSQAPK

SEQ ID NO: 1274 - protein, 58 aa, synthetic construct
  REGION 1..58: note = Engineered IL-1R-I binding polypeptide
VDAKYAKETEQVQMEIFHLPNLTRRQYTAFIRKLLDDPSQSSELLSEAKKLNDSQAPK

SEQ ID NO: 1275 - protein, 58 aa, synthetic construct
  REGION 1..58: note = Engineered IL-1R-I binding polypeptide
VDAKYAKETEKVQMEIFGLPNLTRKQYTAFIRKLFDDPSQSSELLSEAKKLNDSQAPK

SEQ ID NO: 1276 - protein, 58 aa, synthetic construct
  REGION 1..58: note = Engineered IL-1R-I binding polypeptide
VDAKYAKETEEVQMEIFGLPNLTRRQYTAFIRKLLDDPSQSSELLSEAKKLNDSQAPK

SEQ ID NO: 1277 - protein, 58 aa, synthetic construct
  REGION 1..58: note = Engineered IL-1R-I binding polypeptide
VDAKYAKETEEIQMEIYGLPNLTRKQYTAFIRKLLDDPSQSSELLSEAKKLNDSQAPK

SEQ ID NO: 1278 - protein, 58 aa, synthetic construct
  REGION 1..58: note = Engineered IL-1R-I binding polypeptide
VDAKYAKETEEVQMEIFGLPNLTRKQYTAFIRKLFDDPSQSSELLSEAKKLNDSQAPK

SEQ ID NO: 1279 - protein, 58 aa, synthetic construct
  REGION 1..58: note = Engineered IL-1R-I binding polypeptide
VDAKYAKETEAVQMEIFGLPNLTRRQYTAFIRKLLDDPSQSSELLSEAKKLNDSQAPK

SEQ ID NO: 1280 - protein, 58 aa, synthetic construct
  REGION 1..58: note = Engineered IL-1R-I binding polypeptide
VDAKYAKETEVVQMEIFGLPNLTRRQYTAFIRKLLDDPSQSSELLSEAKKLNDSQAPK

SEQ ID NO: 1281 - protein, 58 aa, synthetic construct
  REGION 1..58: note = Engineered IL-1R-I binding polypeptide
VDAKYAKETEVVQMEIFGLPNLTRRQYTAFIRKLFDDPSQSSELLSEAKKLNDSQAPK

SEQ ID NO: 1282 - protein, 58 aa, synthetic construct
  REGION 1..58: note = Engineered IL-1R-I binding polypeptide
VDAKYAKETEEVQMEIFSLPNLTRRQYTAFIRKLLDDPSQSSELLSEAKKLNDSQAPK

SEQ ID NO: 1283 - protein, 58 aa, synthetic construct
  REGION 1..58: note = Engineered IL-1R-I binding polypeptide
VDAKYAKETEEIQMEIFSLPNLTRRQYTAFIRKLLDDPSQSSELLSEAKKLNDSQAPK

SEQ ID NO: 1284 - protein, 58 aa, synthetic construct
  REGION 1..58: note = Engineered IL-1R-I binding polypeptide
VDAKYAKETERVQMEIFSLPNLTRRQYTAFIRKLLDDPSQSSELLSEAKKLNDSQAPK

SEQ ID NO: 1285 - protein, 58 aa, synthetic construct
  REGION 1..58: note = Engineered IL-1R-I binding polypeptide
VDAKYAKELEAIQMEIFYLPNLTRRQYVAFIRKLLDDPSQSSELLSEAKKLNDSQAPK

SEQ ID NO: 1286 - protein, 58 aa, synthetic construct
  REGION 1..58: note = Engineered IL-1R-I binding polypeptide
VDAKYAKEIEEIQMEIFYLPNLTRRQYVAFIRKLLDDPSQSSELLSEAKKLNDSQAPK

SEQ ID NO: 1287 - protein, 58 aa, synthetic construct
  REGION 1..58: note = Engineered IL-1R-I binding polypeptide
VDAKYAKELEKVQMEIFVLPNLTRRQYTAFIRKLLDDPSQSSELLSEAKKLNDSQAPK

SEQ ID NO: 1288 - protein, 58 aa, synthetic construct
  REGION 1..58: note = Engineered IL-1R-I binding polypeptide
VDAKYAKELERIQMEIFYLPNLTRRQYTAFIRKLLDDPSQSSELLSEAKKLNDSQAPK

SEQ ID NO: 1289 - protein, 58 aa, synthetic construct
  REGION 1..58: note = Engineered IL-1R-I binding polypeptide
VDAKYAKELEKVQMEIFYLPNLTRRQYTAFIRKLLDDPSQSSELLSEAKKLNDSQAPK

SEQ ID NO: 1290 - protein, 58 aa, synthetic construct
  REGION 1..58: note = Engineered IL-1R-I binding polypeptide
VDAKYAKEVEQIQMEIFYLPNLTRRQYTAFIRKLLDDPSQSSELLSEAKKLNDSQAPK

SEQ ID NO: 1291 - protein, 58 aa, synthetic construct
  REGION 1..58: note = Engineered IL-1R-I binding polypeptide
VDAKYAKEIEQIQMEIFYLPNLTRRQYTAFIRKLLDDPSQSSELLSEAKKLNDSQAPK

SEQ ID NO: 1292 - protein, 58 aa, synthetic construct
  REGION 1..58: note = Engineered IL-1R-I binding polypeptide
VDAKYAKEIEQVQMEIFYLPNLTRRQYTAFIRKLLDDPSQSSELLSEAKKLNDSQAPK

SEQ ID NO: 1293 - protein, 58 aa, synthetic construct
  REGION 1..58: note = Engineered IL-1R-I binding polypeptide
VDAKYAKEIEQIQMEIFYLPNLTRKQYTAFIRKLLDDPSQSSELLSEAKKLNDSQAPK

SEQ ID NO: 1294 - protein, 58 aa, synthetic construct
  REGION 1..58: note = Engineered IL-1R-I binding polypeptide
VDAKYAKEVEEIQMEIFYLPNLTRRQYTAFIRKLFDDPSQSSELLSEAKKLNDSQAPK

SEQ ID NO: 1295 - protein, 58 aa, synthetic construct
  REGION 1..58: note = Engineered IL-1R-I binding polypeptide
VDAKYAKEVEEIQMEIFFLPNLTRRQYTAFIRKLLDDPSQSSELLSEAKKLNDSQAPK

SEQ ID NO: 1296 - protein, 58 aa, synthetic construct
  REGION 1..58: note = Engineered IL-1R-I binding polypeptide
VDAKYAKEVEEIQMEIFYLPNLTRRQYTAFIRKLLDDPSQSSELLSEAKKLNDSQAPK

SEQ ID NO: 1297 - protein, 58 aa, synthetic construct
  REGION 1..58: note = Engineered IL-1R-I binding polypeptide
VDAKYAKEVEEVQMEIFYLPNLTRRQYTAFIRKLLDDPSQSSELLSEAKKLNDSQAPK

SEQ ID NO: 1298 - protein, 58 aa, synthetic construct
  REGION 1..58: note = Engineered IL-1R-I binding polypeptide
VDAKYAKEIEEIQMEIFYLPNLTRRQYTAFIRKLFDDPSQSSELLSEAKKLNDSQAPK

SEQ ID NO: 1299 - protein, 58 aa, synthetic construct
  REGION 1..58: note = Engineered IL-1R-I binding polypeptide
VDAKYAKEIEEVQMEIFYLPNLTRKQYTAFIRKLFDDPSQSSELLSEAKKLNDSQAPK

SEQ ID NO: 1300 - protein, 58 aa, synthetic construct
  REGION 1..58: note = Engineered IL-1R-I binding polypeptide
VDAKYAKELEEIQMEIFYLPNLTRKQYTAFIRKLLDDPSQSSELLSEAKKLNDSQAPK

SEQ ID NO: 1301 - protein, 58 aa, synthetic construct
  REGION 1..58: note = Engineered IL-1R-I binding polypeptide
VDAKYAKEVEEIQMEIFYLPNLTRKQYTAFIRKLLDDPSQSSELLSEAKKLNDSQAPK

SEQ ID NO: 1302 - protein, 58 aa, synthetic construct
  REGION 1..58: note = Engineered IL-1R-I binding polypeptide
VDAKYAKEVEEVQMEIFYLPNLTRKQYTAFIRKLLDDPSQSSELLSEAKKLNDSQAPK

SEQ ID NO: 1303 - protein, 58 aa, synthetic construct
  REGION 1..58: note = Engineered IL-1R-I binding polypeptide
VDAKYAKEIEEIQMEIFFLPNLTRRQYTAFIRKLLDDPSQSSELLSEAKKLNDSQAPK

SEQ ID NO: 1304 - protein, 58 aa, synthetic construct
  REGION 1..58: note = Engineered IL-1R-I binding polypeptide
VDAKYAKEIEEIQMEIFFLPNLTRKQYTAFIRKLLDDPSQSSELLSEAKKLNDSQAPK

SEQ ID NO: 1305 - protein, 58 aa, synthetic construct
  REGION 1..58: note = Engineered IL-1R-I binding polypeptide
VDAKYAKELEEVQMEIYFLPNLTRRQYTAFIRKLLDDPSQSSELLSEAKKLNDSQAPK

SEQ ID NO: 1306 - protein, 58 aa, synthetic construct
  REGION 1..58: note = Engineered IL-1R-I binding polypeptide
VDAKYAKELEEVQMEIFYLPNLTRRQYTAFIRKLLDDPSQSSELLSEAKKLNDSQAPK

SEQ ID NO: 1307 - protein, 58 aa, synthetic construct
  REGION 1..58: note = Engineered IL-1R-I binding polypeptide
VDAKYAKELEEIQMEIFYLPNLTRRQYTAFIRKLLDDPSQSSELLSEAKKLNDSQAPK

SEQ ID NO: 1308 - protein, 58 aa, synthetic construct
  REGION 1..58: note = Engineered IL-1R-I binding polypeptide
VDAKYAKEIEEVQMEIFYLPNLTRRQYTAFIRKLLDDPSQSSELLSEAKKLNDSQAPK

SEQ ID NO: 1309 - protein, 58 aa, synthetic construct
  REGION 1..58: note = Engineered IL-1R-I binding polypeptide
VDAKYAKEIEEIQMEIFYLPNLTRRQYTAFIRKLLDDPSQSSELLSEAKKLNDSQAPK

SEQ ID NO: 1310 - protein, 58 aa, synthetic construct
  REGION 1..58: note = Engineered IL-1R-I binding polypeptide
VDAKYAKEIEEIQMEIFDLPNLTRRQYTAFIRKLLDDPSQSSELLSEAKKLNDSQAPK

SEQ ID NO: 1311 - protein, 58 aa, synthetic construct
  REGION 1..58: note = Engineered IL-1R-I binding polypeptide
VDAKYAKEVEEVQMEIFDLPNLTRRQYTAFIRKLLDDPSQSSELLSEAKKLNDSQAPK

SEQ ID NO: 1312 - protein, 58 aa, synthetic construct
  REGION 1..58: note = Engineered IL-1R-I binding polypeptide
VDAKYAKEVEEIQMEIFDLPNLTRRQYTAFIRKLLDDPSQSSELLSEAKKLNDSQAPK

SEQ ID NO: 1313 - protein, 58 aa, synthetic construct
  REGION 1..58: note = Engineered IL-1R-I binding polypeptide
VDAKYAKELERIQMEIFHLPNLTRKQYTAFIRKLLDDPSQSSELLSEAKKLNDSQAPK

SEQ ID NO: 1314 - protein, 58 aa, synthetic construct
  REGION 1..58: note = Engineered IL-1R-I binding polypeptide
VDAKYAKEIEKVQMEIFHLPNLTRKQYTAFIRKLLDDPSQSSELLSEAKKLNDSQAPK

SEQ ID NO: 1315 - protein, 58 aa, synthetic construct
  REGION 1..58: note = Engineered IL-1R-I binding polypeptide
VDAKYAKELEKVQMEIFRLPNLTRRQYTAFIRKLLDDPSQSSELLSEAKKLNDSQAPK

SEQ ID NO: 1316 - protein, 58 aa, synthetic construct
  REGION 1..58: note = Engineered IL-1R-I binding polypeptide
VDAKYAKELEKVQMEIFHLPNLTRRQYTAFIRKLLDDPSQSSELLSEAKKLNDSQAPK

SEQ ID NO: 1317 - protein, 58 aa, synthetic construct
  REGION 1..58: note = Engineered IL-1R-I binding polypeptide
VDAKYAKEVEKIQMEIFRLPNLTRRQYTAFIRKLLDDPSQSSELLSEAKKLNDSQAPK

SEQ ID NO: 1318 - protein, 58 aa, synthetic construct
  REGION 1..58: note = Engineered IL-1R-I binding polypeptide
VDAKYAKETEKVQMEIFRLPNLTRRQYTAFIRKLLDDPSQSSELLSEAKKLNDSQAPK

SEQ ID NO: 1319 - protein, 58 aa, synthetic construct
  REGION 1..58: note = Engineered IL-1R-I binding polypeptide
VDAKYAKEIEEVQMEIFRLPNLTRKQYTAFIRKLLDDPSQSSELLSEAKKLNDSQAPK

SEQ ID NO: 1320 - protein, 58 aa, synthetic construct
  REGION 1..58: note = Engineered IL-1R-I binding polypeptide
VDAKYAKELEEVQMEIFRLPNLTRKQYTAFIRKLFDDPSQSSELLSEAKKLNDSQAPK

SEQ ID NO: 1321 - protein, 58 aa, synthetic construct
  REGION 1..58: note = Engineered IL-1R-I binding polypeptide
VDAKYAKEIEEIQMEIFRLPNLTRKQYTAFIRKLFDDPSQSSELLSEAKKLNDSQAPK

SEQ ID NO: 1322 - protein, 58 aa, synthetic construct
  REGION 1..58: note = Engineered IL-1R-I binding polypeptide
VDAKYAKEIEEIQMEIFHLPNLTRKQYTAFIRKLFDDPSQSSELLSEAKKLNDSQAPK

SEQ ID NO: 1323 - protein, 58 aa, synthetic construct
  REGION 1..58: note = Engineered IL-1R-I binding polypeptide
VDAKYAKELEEIQMEIFHLPNLTRKQYTAFIRKLLDDPSQSSELLSEAKKLNDSQAPK

SEQ ID NO: 1324 - protein, 58 aa, synthetic construct
  REGION 1..58: note = Engineered IL-1R-I binding polypeptide
VDAKYAKEIEEIQMEIFHLPNLTRKQYTAFIRKLLDDPSQSSELLSEAKKLNDSQAPK

SEQ ID NO: 1325 - protein, 58 aa, synthetic construct
  REGION 1..58: note = Engineered IL-1R-I binding polypeptide
VDAKYAKELETVQMEIFRLPNLTRRQYTAFIRKLLDDPSQSSELLSEAKKLNDSQAPK

SEQ ID NO: 1326 - protein, 58 aa, synthetic construct
  REGION 1..58: note = Engineered IL-1R-I binding polypeptide
VDAKYAKEIEQVQMEIFRLPNLTRRQYTAFIRKLLDDPSQSSELLSEAKKLNDSQAPK

SEQ ID NO: 1327 - protein, 58 aa, synthetic construct
  REGION 1..58: note = Engineered IL-1R-I binding polypeptide
VDAKYAKEIEQIQMEIFRLPNLTRRQYTAFIRKLLDDPSQSSELLSEAKKLNDSQAPK

SEQ ID NO: 1328 - protein, 58 aa, synthetic construct
  REGION 1..58: note = Engineered IL-1R-I binding polypeptide
VDAKYAKEIEEIQMEIFRLPNLTRRQYTAFIRKLLDDPSQSSELLSEAKKLNDSQAPK

SEQ ID NO: 1329 - protein, 58 aa, synthetic construct
  REGION 1..58: note = Engineered IL-1R-I binding polypeptide
VDAKYAKELEEIQMEIFRLPNLTRRQYTAFIRKLLDDPSQSSELLSEAKKLNDSQAPK

SEQ ID NO: 1330 - protein, 58 aa, synthetic construct
  REGION 1..58: note = Engineered IL-1R-I binding polypeptide
VDAKYAKELEEIQMEIFHLPNLTRRQYTAFIRKLLDDPSQSSELLSEAKKLNDSQAPK

SEQ ID NO: 1331 - protein, 58 aa, synthetic construct
  REGION 1..58: note = Engineered IL-1R-I binding polypeptide
VDAKYAKEIEEIQMEIFHLPNLTRRQYTAFIRKLLDDPSQSSELLSEAKKLNDSQAPK

SEQ ID NO: 1332 - protein, 58 aa, synthetic construct
  REGION 1..58: note = Engineered IL-1R-I binding polypeptide
VDAKYAKEVEEIQMEIFHLPNLTRKQYTAFIRKLFDDPSQSSELLSEAKKLNDSQAPK

SEQ ID NO: 1333 - protein, 58 aa, synthetic construct
  REGION 1..58: note = Engineered IL-1R-I binding polypeptide
VDAKYAKEVEEVQMEIFELPNLTRRQYTAFIRKLLDDPSQSSELLSEAKKLNDSQAPK

SEQ ID NO: 1334 - protein, 58 aa, synthetic construct
  REGION 1..58: note = Engineered IL-1R-I binding polypeptide
VDAKYAKEVEEIQMEIFELPNLTRRQYTAFIRKLLDDPSQSSELLSEAKKLNDSQAPK

SEQ ID NO: 1335 - protein, 58 aa, synthetic construct
  REGION 1..58: note = Engineered IL-1R-I binding polypeptide
VDAKYAKEVEQVQMEIFHLPNLTRRQYTAFIRKLLDDPSQSSELLSEAKKLNDSQAPK

SEQ ID NO: 1336 - protein, 58 aa, synthetic construct
  REGION 1..58: note = Engineered IL-1R-I binding polypeptide
VDAKYAKEVEQIQMEIFHLPNLTRKQYTAFIRKLLDDPSQSSELLSEAKKLNDSQAPK

SEQ ID NO: 1337 - protein, 58 aa, synthetic construct
  REGION 1..58: note = Engineered IL-1R-I binding polypeptide
VDAKYAKEVEEIQMEIFHLPNLTRKQYTAFIRKLLDDPSQSSELLSEAKKLNDSQAPK

SEQ ID NO: 1338 - protein, 58 aa, synthetic construct
  REGION 1..58: note = Engineered IL-1R-I binding polypeptide
VDAKYAKEVEEVQMEIFHLPNLTRKQYTAFIRKLLDDPSQSSELLSEAKKLNDSQAPK

SEQ ID NO: 1339 - protein, 58 aa, synthetic construct
  REGION 1..58: note = Engineered IL-1R-I binding polypeptide
VDAKYAKEVEEVQMEIFHLPNLTRRQYTAFIRKLLDDPSQSSELLSEAKKLNDSQAPK

SEQ ID NO: 1340 - protein, 58 aa, synthetic construct
  REGION 1..58: note = Engineered IL-1R-I binding polypeptide
VDAKYAKEVEEIQMEIFHLPNLTRRQYTAFIRKLLDDPSQSSELLSEAKKLNDSQAPK

SEQ ID NO: 1341 - protein, 58 aa, synthetic construct
  REGION 1..58: note = Engineered IL-1R-I binding polypeptide
VDAKYAKEVEEIQMEIFRLPNLTRKQYTAFIRKLLDDPSQSSELLSEAKKLNDSQAPK

SEQ ID NO: 1342 - protein, 58 aa, synthetic construct
  REGION 1..58: note = Engineered IL-1R-I binding polypeptide
VDAKYAKEVEEVQMEIFRLPNLTRKQYTAFIRKLLDDPSQSSELLSEAKKLNDSQAPK

SEQ ID NO: 1343 - protein, 58 aa, synthetic construct
  REGION 1..58: note = Engineered IL-1R-I binding polypeptide
VDAKYAKEVEEIQMEIFRLPNLTRRQYTAFIRKLFDDPSQSSELLSEAKKLNDSQAPK

SEQ ID NO: 1344 - protein, 58 aa, synthetic construct
  REGION 1..58: note = Engineered IL-1R-I binding polypeptide
VDAKYAKEVEEVQMEIFRLPNLTRRQYTAFIRKLLDDPSQSSELLSEAKKLNDSQAPK

SEQ ID NO: 1345 - protein, 58 aa, synthetic construct
  REGION 1..58: note = Engineered IL-1R-I binding polypeptide
VDAKYAKEVERIQMEIFSLPNLTRKQYTAFIRKLLDDPSQSSELLSEAKKLNDSQAPK

SEQ ID NO: 1346 - protein, 58 aa, synthetic construct
  REGION 1..58: note = Engineered IL-1R-I binding polypeptide
VDAKYAKEVEKIQMEIFSLPNLTRKQYTAFIRKLFDDPSQSSELLSEAKKLNDSQAPK

SEQ ID NO: 1347 - protein, 58 aa, synthetic construct
  REGION 1..58: note = Engineered IL-1R-I binding polypeptide
VDAKYAKEIETVQMEIFSLPNLTRKQYTAFIRKLFDDPSQSSELLSEAKKLNDSQAPK

SEQ ID NO: 1348 - protein, 58 aa, synthetic construct
  REGION 1..58: note = Engineered IL-1R-I binding polypeptide
VDAKYAKELETVQMEIFSLPNLTRKQYTAFIRKLLDDPSQSSELLSEAKKLNDSQAPK

SEQ ID NO: 1349 - protein, 58 aa, synthetic construct
  REGION 1..58: note = Engineered IL-1R-I binding polypeptide
VDAKYAKELEEIQMEIFSLPNLTRRQYTAFIRKLLDDPSQSSELLSEAKKLNDSQAPK

SEQ ID NO: 1350 - protein, 58 aa, synthetic construct
  REGION 1..58: note = Engineered IL-1R-I binding polypeptide
VDAKYAKEVEEIQMEIFSLPNLTRKQYTAFIRKLLDDPSQSSELLSEAKKLNDSQAPK

SEQ ID NO: 1351 - protein, 58 aa, synthetic construct
  REGION 1..58: note = Engineered IL-1R-I binding polypeptide
VDAKYAKELETVQMEIFGLPNLTRRQYTAFIRKLLDDPSQSSELLSEAKKLNDSQAPK

SEQ ID NO: 1352 - protein, 58 aa, synthetic construct
  REGION 1..58: note = Engineered IL-1R-I binding polypeptide
VDAKYAKELEKVQMEIFGLPNLTRRQYTAFIRKLLDDPSQSSELLSEAKKLNDSQAPK

SEQ ID NO: 1353 - protein, 58 aa, synthetic construct
  REGION 1..58: note = Engineered IL-1R-I binding polypeptide
VDAKYAKEIEEIQMEIFGLPNLTRKQYTAFIRKLLDDPSQSSELLSEAKKLNDSQAPK

SEQ ID NO: 1354 - protein, 58 aa, synthetic construct
  REGION 1..58: note = Engineered IL-1R-I binding polypeptide
VDAKYAKELEEVQMEIFGLPNLTRKQYTAFIRKLLDDPSQSSELLSEAKKLNDSQAPK

SEQ ID NO: 1355 - protein, 58 aa, synthetic construct
  REGION 1..58: note = Engineered IL-1R-I binding polypeptide
VDAKYAKEIEEIQMEIFGLPNLTRRQYTAFIRKLFDDPSQSSELLSEAKKLNDSQAPK

SEQ ID NO: 1356 - protein, 58 aa, synthetic construct
  REGION 1..58: note = Engineered IL-1R-I binding polypeptide
VDAKYAKEIEEIQMEIFGLPNLTRRQYTAFIRKLLDDPSQSSELLSEAKKLNDSQAPK

SEQ ID NO: 1357 - protein, 58 aa, synthetic construct
  REGION 1..58: note = Engineered IL-1R-I binding polypeptide
VDAKYAKEIEEVQMEIFGLPNLTRRQYTAFIRKLLDDPSQSSELLSEAKKLNDSQAPK

SEQ ID NO: 1358 - protein, 58 aa, synthetic construct
  REGION 1..58: note = Engineered IL-1R-I binding polypeptide
VDAKYAKEVEEIQMEIFGLPNLTRKQYTAFIRKLFDDPSQSSELLSEAKKLNDSQAPK

SEQ ID NO: 1359 - protein, 58 aa, synthetic construct
  REGION 1..58: note = Engineered IL-1R-I binding polypeptide
VDAKYAKEVEEIQMEIFGLPNLTRKQYTAFIRKLLDDPSQSSELLSEAKKLNDSQAPK

SEQ ID NO: 1360 - protein, 58 aa, synthetic construct
  REGION 1..58: note = Engineered IL-1R-I binding polypeptide
VDAKYAKEVEEVQMEIFGLPNLTRKQYTAFIRKLLDDPSQSSELLSEAKKLNDSQAPK

SEQ ID NO: 1361 - protein, 58 aa, synthetic construct
  REGION 1..58: note = Engineered IL-1R-I binding polypeptide
VDAKYAKEVEEIQMEIFGLPNLTRRQYTAFIRKLLDDPSQSSELLSEAKKLNDSQAPK

SEQ ID NO: 1362 - protein, 58 aa, synthetic construct
  REGION 1..58: note = Engineered IL-1R-I binding polypeptide
VDAKYAKEVEEVQMEIFGLPNLTRRQYTAFIRKLLDDPSQSSELLSEAKKLNDSQAPK

SEQ ID NO: 1363 - protein, 58 aa, synthetic construct
  REGION 1..58: note = Engineered IL-1R-I binding polypeptide
VDAKYAKETEEVQMEIFALPNLTRKQYTAFIRKLLDDPSQSSELLSEAKKLNDSQAPK

SEQ ID NO: 1364 - protein, 58 aa, synthetic construct
  REGION 1..58: note = Engineered IL-1R-I binding polypeptide
VDAKYAKETEEVQMEIFALPNLTRRQYTAFIRKLLDDPSQSSELLSEAKKLNDSQAPK

SEQ ID NO: 1365 - protein, 58 aa, synthetic construct
  REGION 1..58: note = Engineered IL-1R-I binding polypeptide
VDAKYAKEIEQIQMEIFALPNLTRRQYTAFIRKLLDDPSQSSELLSEAKKLNDSQAPK

SEQ ID NO: 1366 - protein, 58 aa, synthetic construct
  REGION 1..58: note = Engineered IL-1R-I binding polypeptide
VDAKYAKEIEEVQMEIFALPNLTRRQYTAFIRKLLDDPSQSSELLSEAKKLNDSQAPK

SEQ ID NO: 1367 - protein, 58 aa, synthetic construct
  REGION 1..58: note = Engineered IL-1R-I binding polypeptide
VDAKYAKEIEEIQMEIFALPNLTRRQYTAFIRKLLDDPSQSSELLSEAKKLNDSQAPK

SEQ ID NO: 1368 - protein, 58 aa, synthetic construct
  REGION 1..58: note = Engineered IL-1R-I binding polypeptide
VDAKYAKEVEEIQMEIFALPNLTRRQYTAFIRKLLDDPSQSSELLSEAKKLNDSQAPK

SEQ ID NO: 1369 - protein, 58 aa, synthetic construct
  REGION 1..58: note = Engineered IL-1R-I binding polypeptide
VDAKYAKEVEEVQMEIFALPNLTRRQYTAFIRKLLDDPSQSSELLSEAKKLNDSQAPK

SEQ ID NO: 1370 - protein, 58 aa, synthetic construct
  REGION 1..58: note = Engineered IL-1R-I binding polypeptide
VDAKYAKEIEQIQMEIFALPNLTRKQYTAFIRKLLDDPSQSSELLSEAKKLNDSQAPK

SEQ ID NO: 1371 - protein, 58 aa, synthetic construct
  REGION 1..58: note = Engineered IL-1R-I binding polypeptide
VDAKYAKEIEQVQMEIFALPNLTRKQYTAFIRKLFDDPSQSSELLSEAKKLNDSQAPK

SEQ ID NO: 1372 - protein, 58 aa, synthetic construct
  REGION 1..58: note = Engineered IL-1R-I binding polypeptide
VDAKYAKEIEEIQMEIFALPNLTRKQYTAFIRKLLDDPSQSSELLSEAKKLNDSQAPK

SEQ ID NO: 1373 - protein, 58 aa, synthetic construct
  REGION 1..58: note = Engineered IL-1R-I binding polypeptide
VDAKYAKEIEEVQMEIFALPNLTRKQYTAFIRKLLDDPSQSSELLSEAKKLNDSQAPK

SEQ ID NO: 1374 - protein, 58 aa, synthetic construct
  REGION 1..58: note = Engineered IL-1R-I binding polypeptide
VDAKYAKEIEEVQMEIFALPNLTRKQYTAFIRKLFDDPSQSSELLSEAKKLNDSQAPK

SEQ ID NO: 1375 - protein, 58 aa, synthetic construct
  REGION 1..58: note = Engineered IL-1R-I binding polypeptide
VDAKYAKEVEEIQMEIFALPNLTRKQYTAFIRKLFDDPSQSSELLSEAKKLNDSQAPK

SEQ ID NO: 1376 - protein, 58 aa, synthetic construct
  REGION 1..58: note = Engineered IL-1R-I binding polypeptide
VDAKYAKETEIVQMEIFHLPNLTRKQYTAFIRKLLDDPSQSSELLSEAKKLNDSQAPK

SEQ ID NO: 1377 - protein, 58 aa, synthetic construct
  REGION 1..58: note = Engineered IL-1R-I binding polypeptide
VDAKYAKETEVVQMEIFHLPNLTRKQYTAFIRKLLDDPSQSSELLSEAKKLNDSQAPK

SEQ ID NO: 1378 - protein, 58 aa, synthetic construct
  REGION 1..58: note = Engineered IL-1R-I binding polypeptide
VDAKYAKETEIVQMEIFGLPNLTRKQYTAFIRKLLDDPSQSSELLSEAKKLNDSQAPK

SEQ ID NO: 1379 - protein, 58 aa, synthetic construct
  REGION 1..58: note = Engineered IL-1R-I binding polypeptide
VDAKYAKEIEIIQMEIFYLPNLTRKQYTAFIRKLLDDPSQSSELLSEAKKLNDSQAPK

SEQ ID NO: 1380 - protein, 58 aa, synthetic construct
  REGION 1..58: note = Engineered IL-1R-I binding polypeptide
VDAKYAKEIEYIQMEIFYLPNLTRRQYTAFIRKLLDDPSQSSELLSEAKKLNDSQAPK

SEQ ID NO: 1381 - protein, 58 aa, synthetic construct
  REGION 1..58: note = Engineered IL-1R-I binding polypeptide
VDAKYAKEIEVVQMEIFYLPNLTRRQYTAFIRKLLDDPSQSSELLSEAKKLNDSQAPK

SEQ ID NO: 1382 - protein, 58 aa, synthetic construct
  REGION 1..58: note = Engineered IL-1R-I binding polypeptide
VDAKYAKELEVIQMEIFELPNLTRRQYTAFIRKLLDDPSQSSELLSEAKKLNDSQAPK

SEQ ID NO: 1383 - protein, 58 aa, synthetic construct
  REGION 1..58: note = Engineered IL-1R-I binding polypeptide
VDAKYAKEVEVIQMEIFHLPNLTRKQYTAFIRKLLDDPSQSSELLSEAKKLNDSQAPK

SEQ ID NO: 1384 - protein, 58 aa, synthetic construct
  REGION 1..58: note = Engineered IL-1R-I binding polypeptide
VDAKYAKEVEVIQMEIFRLPNLTRKQYTAFIRKLLDDPSQSSELLSEAKKLNDSQAPK

SEQ ID NO: 1385 - protein, 58 aa, synthetic construct
  REGION 1..58: note = Engineered IL-1R-I binding polypeptide
VDAKYAKEVEVVQMEIFRLPNLTRKQYTAFIRKLLDDPSQSSELLSEAKKLNDSQAPK

SEQ ID NO: 1386 - protein, 58 aa, synthetic construct
  REGION 1..58: note = Engineered IL-1R-I binding polypeptide
VDAKYAKEVEVIQMEIFRLPNLTRRQYTAFIRKLLDDPSQSSELLSEAKKLNDSQAPK

SEQ ID NO: 1387 - protein, 58 aa, synthetic construct
  REGION 1..58: note = Engineered IL-1R-I binding polypeptide
VDAKYAKELEVIQMEIFKLPNLTRKQYTAFIRKLLDDPSQSSELLSEAKKLNDSQAPK

SEQ ID NO: 1388 - protein, 58 aa, synthetic construct
  REGION 1..58: note = Engineered IL-1R-I binding polypeptide
VDAKYAKEIEVVQMEIFHLPNLTRKQYTAFIRKLLDDPSQSSELLSEAKKLNDSQAPK

SEQ ID NO: 1389 - protein, 58 aa, synthetic construct
  REGION 1..58: note = Engineered IL-1R-I binding polypeptide
VDAKYAKEIEVIQMEIFRLPNLTRKQYTAFIRKLLDDPSQSSELLSEAKKLNDSQAPK

SEQ ID NO: 1390 - protein, 58 aa, synthetic construct
  REGION 1..58: note = Engineered IL-1R-I binding polypeptide
VDAKYAKEVEYIQMEIFRLPNLTRRQYTAFIRKLLDDPSQSSELLSEAKKLNDSQAPK

SEQ ID NO: 1391 - protein, 58 aa, synthetic construct
  REGION 1..58: note = Engineered IL-1R-I binding polypeptide
VDAKYAKELEIVQMEIFHLPNLTRRQYTAFIRKLLDDPSQSSELLSEAKKLNDSQAPK

SEQ ID NO: 1392 - protein, 58 aa, synthetic construct
  REGION 1..58: note = Engineered IL-1R-I binding polypeptide
VDAKYAKELEIIQMEIFHLPNLTRRQYTAFIRKLLDDPSQSSELLSEAKKLNDSQAPK

SEQ ID NO: 1393 - protein, 58 aa, synthetic construct
  REGION 1..58: note = Engineered IL-1R-I binding polypeptide
VDAKYAKEVEIIQMEIFHLPNLTRRQYTAFIRKLLDDPSQSSELLSEAKKLNDSQAPK

SEQ ID NO: 1394 - protein, 58 aa, synthetic construct
  REGION 1..58: note = Engineered IL-1R-I binding polypeptide
VDAKYAKELEVIQMEIFALPNLTRKQYTAFIRKLLDDPSQSSELLSEAKKLNDSQAPK

SEQ ID NO: 1395 - protein, 58 aa, synthetic construct
  REGION 1..58: note = Engineered IL-1R-I binding polypeptide
VDAKYAKELEVIQMEIFALPNLTRKQYTAFIRKLFDDPSQSSELLSEAKKLNDSQAPK

SEQ ID NO: 1396 - protein, 58 aa, synthetic construct
  REGION 1..58: note = Engineered IL-1R-I binding polypeptide
VDAKYAKEVEIIQMEIFALPNLTRKQYTAFIRKLFDDPSQSSELLSEAKKLNDSQAPK

SEQ ID NO: 1397 - protein, 58 aa, synthetic construct
  REGION 1..58: note = Engineered IL-1R-I binding polypeptide
VDAKYAKEVEIIQMEIFALPNLTRKQYTAFIRKLLDDPSQSSELLSEAKKLNDSQAPK

SEQ ID NO: 1398 - protein, 58 aa, synthetic construct
  REGION 1..58: note = Engineered IL-1R-I binding polypeptide
VDAKYAKEVEVIQMEIFSLPNLTRKQYTAFIRKLLDDPSQSSELLSEAKKLNDSQAPK

SEQ ID NO: 1399 - protein, 58 aa, synthetic construct
  REGION 1..58: note = Engineered IL-1R-I binding polypeptide
VDAKYAKEVEVVQMEIFSLPNLTRKQYTAFIRKLLDDPSQSSELLSEAKKLNDSQAPK

SEQ ID NO: 1400 - protein, 58 aa, synthetic construct
  REGION 1..58: note = Engineered IL-1R-I binding polypeptide
VDAKYAKELEIVQMEIFSLPNLTRRQYTAFIRKLLDDPSQSSELLSEAKKLNDSQAPK

SEQ ID NO: 1401 - protein, 58 aa, synthetic construct
  REGION 1..58: note = Engineered IL-1R-I binding polypeptide
VDAKYAKEIEYIQMEIFGLPNLTRRQYTAFIRKLLDDPSQSSELLSEAKKLNDSQAPK

SEQ ID NO: 1402 - protein, 58 aa, synthetic construct
  REGION 1..58: note = Engineered IL-1R-I binding polypeptide
VDAKYAKEVEVIQMEIFGLPNLTRRQYTAFIRKLLDDPSQSSELLSEAKKLNDSQAPK

SEQ ID NO: 1403 - protein, 58 aa, synthetic construct
  REGION 1..58: note = Engineered IL-1R-I binding polypeptide
VDAKYAKEVEIIQMEIFGLPNLTRRQYTAFIRKLLDDPSQSSELLSEAKKLNDSQAPK

SEQ ID NO: 1404 - protein, 58 aa, synthetic construct
  REGION 1..58: note = Engineered IL-1R-I binding polypeptide
VDAKYAKEVETVQMEIFRLPNLTRKQYTAFIRKLLDDPSQSSELLSEAKKLNDSQAPK

SEQ ID NO: 1405 - protein, 58 aa, synthetic construct
  REGION 1..58: note = Engineered IL-1R-I binding polypeptide
VDAKYAKELETVQMEIFHLPNLTRKQYTAFIRKLLDDPSQSSELLSEAKKLNDSQAPK

SEQ ID NO: 1406 - protein, 58 aa, synthetic construct
  REGION 1..58: note = Engineered IL-1R-I binding polypeptide
VDAKYAKELEAIQMEIFTLPNLTRRQYTAFIRKLLDDPSQSSELLSEAKKLNDSQAPK

SEQ ID NO: 1407 - protein, 58 aa, synthetic construct
  REGION 1..58: note = Engineered IL-1R-I binding polypeptide
VDAKYAKEIEAIQMEIYYLPNLTRRQYTAFIRKLLDDPSQSSELLSEAKKLNDSQAPK

SEQ ID NO: 1408 - protein, 58 aa, synthetic construct
  REGION 1..58: note = Engineered IL-1R-I binding polypeptide
VDAKYAKELEAIQMEIFYLPNLTRRQYTAFIRKLLDDPSQSSELLSEAKKLNDSQAPK

SEQ ID NO: 1409 - protein, 58 aa, synthetic construct
  REGION 1..58: note = Engineered IL-1R-I binding polypeptide
VDAKYAKELEAVQMEIFYLPNLTRRQYTAFIRKLLDDPSQSSELLSEAKKLNDSQAPK

SEQ ID NO: 1410 - protein, 58 aa, synthetic construct
  REGION 1..58: note = Engineered IL-1R-I binding polypeptide
VDAKYAKEIEAVQMEIFYLPNLTRRQYTAFIRKLLDDPSQSSELLSEAKKLNDSQAPK

SEQ ID NO: 1411 - protein, 58 aa, synthetic construct
  REGION 1..58: note = Engineered IL-1R-I binding polypeptide
VDAKYAKEIEAIQMEIFYLPNLTRRQYTAFIRKLLDDPSQSSELLSEAKKLNDSQAPK

SEQ ID NO: 1412 - protein, 58 aa, synthetic construct
  REGION 1..58: note = Engineered IL-1R-I binding polypeptide
VDAKYAKEIEAIQMEIFFLPNLTRKQYTAFIRKLLDDPSQSSELLSEAKKLNDSQAPK

SEQ ID NO: 1413 - protein, 58 aa, synthetic construct
  REGION 1..58: note = Engineered IL-1R-I binding polypeptide
VDAKYAKEIEAIQMEIFFLPNLTRRQYTAFIRKLLDDPSQSSELLSEAKKLNDSQAPK

SEQ ID NO: 1414 - protein, 58 aa, synthetic construct
  REGION 1..58: note = Engineered IL-1R-I binding polypeptide
VDAKYAKEIEAIQMEIFYLPNLTRKQYTAFIRKLLDDPSQSSELLSEAKKLNDSQAPK

SEQ ID NO: 1415 - protein, 58 aa, synthetic construct
  REGION 1..58: note = Engineered IL-1R-I binding polypeptide
VDAKYAKELEAIQMEIFRLPNLTRRQYTAFIRKLLDDPSQSSELLSEAKKLNDSQAPK

SEQ ID NO: 1416 - protein, 58 aa, synthetic construct
  REGION 1..58: note = Engineered IL-1R-I binding polypeptide
VDAKYAKEIEAIQMEIFRLPNLTRKQYTAFIRKLLDDPSQSSELLSEAKKLNDSQAPK

SEQ ID NO: 1417 - protein, 58 aa, synthetic construct
  REGION 1..58: note = Engineered IL-1R-I binding polypeptide
VDAKYAKELEAIQMEIFRLPNLTRKQYTAFIRKLLDDPSQSSELLSEAKKLNDSQAPK

SEQ ID NO: 1418 - protein, 58 aa, synthetic construct
  REGION 1..58: note = Engineered IL-1R-I binding polypeptide
VDAKYAKEVEAIQMEIFHLPNLTRRQYTAFIRKLLDDPSQSSELLSEAKKLNDSQAPK

SEQ ID NO: 1419 - protein, 58 aa, synthetic construct
  REGION 1..58: note = Engineered IL-1R-I binding polypeptide
VDAKYAKEIEAVQMEIFHLPNLTRKQYTAFIRKLLDDPSQSSELLSEAKKLNDSQAPK

SEQ ID NO: 1420 - protein, 58 aa, synthetic construct
  REGION 1..58: note = Engineered IL-1R-I binding polypeptide
VDAKYAKEIEAIQMEIFHLPNLTRRQYTAFIRKLLDDPSQSSELLSEAKKLNDSQAPK

SEQ ID NO: 1421 - protein, 58 aa, synthetic construct
  REGION 1..58: note = Engineered IL-1R-I binding polypeptide
VDAKYAKELEAIQMEIFHLPNLTRRQYTAFIRKLLDDPSQSSELLSEAKKLNDSQAPK

SEQ ID NO: 1422 - protein, 58 aa, synthetic construct
  REGION 1..58: note = Engineered IL-1R-I binding polypeptide
VDAKYAKEVEAIQMEIFHLPNLTRKQYTAFIRKLLDDPSQSSELLSEAKKLNDSQAPK

SEQ ID NO: 1423 - protein, 58 aa, synthetic construct
  REGION 1..58: note = Engineered IL-1R-I binding polypeptide
VDAKYAKEVEAIQMEIFHLPNLTRKQYTAFIRKLFDDPSQSSELLSEAKKLNDSQAPK

SEQ ID NO: 1424 - protein, 58 aa, synthetic construct
  REGION 1..58: note = Engineered IL-1R-I binding polypeptide
VDAKYAKEVEAVQMEIFSLPNLTRRQYTAFIRKLLDDPSQSSELLSEAKKLNDSQAPK

SEQ ID NO: 1425 - protein, 58 aa, synthetic construct
  REGION 1..58: note = Engineered IL-1R-I binding polypeptide
VDAKYAKEIEAVQMEIFSLPNLTRRQYTAFIRKLLDDPSQSSELLSEAKKLNDSQAPK

SEQ ID NO: 1426 - protein, 58 aa, synthetic construct
  REGION 1..58: note = Engineered IL-1R-I binding polypeptide
VDAKYAKELEAIQMEIFSLPNLTRRQYTAFIRKLLDDPSQSSELLSEAKKLNDSQAPK

SEQ ID NO: 1427 - protein, 58 aa, synthetic construct
  REGION 1..58: note = Engineered IL-1R-I binding polypeptide
VDAKYAKEIEAVQMEIFSLPNLTRKQYTAFIRKLLDDPSQSSELLSEAKKLNDSQAPK

SEQ ID NO: 1428 - protein, 58 aa, synthetic construct
  REGION 1..58: note = Engineered IL-1R-I binding polypeptide
VDAKYAKEIEAIQMEIFGLPNLTRRQYTAFIRKLFDDPSQSSELLSEAKKLNDSQAPK

SEQ ID NO: 1429 - protein, 58 aa, synthetic construct
  REGION 1..58: note = Engineered IL-1R-I binding polypeptide
VDAKYAKEVEAIQMEIFGLPNLTRKQYTAFIRKLLDDPSQSSELLSEAKKLNDSQAPK

SEQ ID NO: 1430 - protein, 58 aa, synthetic construct
  REGION 1..58: note = Engineered IL-1R-I binding polypeptide
VDAKYAKEVEAIQMEIFGLPNLTRRQYTAFIRKLLDDPSQSSELLSEAKKLNDSQAPK

SEQ ID NO: 1431 - protein, 58 aa, synthetic construct
  REGION 1..58: note = Engineered IL-1R-I binding polypeptide
VDAKYAKEIEAVQMEIFGLPNLTRKQYTAFIRKLLDDPSQSSELLSEAKKLNDSQAPK

SEQ ID NO: 1432 - protein, 58 aa, synthetic construct
  REGION 1..58: note = Engineered IL-1R-I binding polypeptide
VDAKYAKEIEAIQMEIFGLPNLTRKQYTAFIRKLLDDPSQSSELLSEAKKLNDSQAPK

SEQ ID NO: 1433 - protein, 58 aa, synthetic construct
  REGION 1..58: note = Engineered IL-1R-I binding polypeptide
VDAKYAKETEAIQMEIFALPNLTRKQYTAFIRKLLDDPSQSSELLSEAKKLNDSQAPK

SEQ ID NO: 1434 - protein, 58 aa, synthetic construct
  REGION 1..58: note = Engineered IL-1R-I binding polypeptide
VDAKYAKETEAVQMEIFALPNLTRKQYTAFIRKLLDDPSQSSELLSEAKKLNDSQAPK

SEQ ID NO: 1435 - protein, 58 aa, synthetic construct
  REGION 1..58: note = Engineered IL-1R-I binding polypeptide
VDAKYAKETEAVQMEIFALPNLTRRQYTAFIRKLLDDPSQSSELLSEAKKLNDSQAPK

SEQ ID NO: 1436 - protein, 58 aa, synthetic construct
  REGION 1..58: note = Engineered IL-1R-I binding polypeptide
VDAKYAKETEAIQMEIFALPNLTRRQYTAFIRKLLDDPSQSSELLSEAKKLNDSQAPK

SEQ ID NO: 1437 - protein, 58 aa, synthetic construct
  REGION 1..58: note = Engineered IL-1R-I binding polypeptide
VDAKYAKEIEAVQMEIFALPNLTRKQYTAFIRKLFDDPSQSSELLSEAKKLNDSQAPK

SEQ ID NO: 1438 - protein, 58 aa, synthetic construct
  REGION 1..58: note = Engineered IL-1R-I binding polypeptide
VDAKYAKEIEAIQMEIFALPNLTRRQYTAFIRKLLDDPSQSSELLSEAKKLNDSQAPK

SEQ ID NO: 1439 - protein, 58 aa, synthetic construct
  REGION 1..58: note = Engineered IL-1R-I binding polypeptide
VDAKYAKEVEAVQMEIFALPNLTRRQYTAFIRKLLDDPSQSSELLSEAKKLNDSQAPK

SEQ ID NO: 1440 - protein, 58 aa, synthetic construct
  REGION 1..58: note = Engineered IL-1R-I binding polypeptide
VDAKYAKEVEAVQMEIFALPNLTRKQYTAFIRKLLDDPSQSSELLSEAKKLNDSQAPK

SEQ ID NO: 1441 - protein, 58 aa, synthetic construct
  REGION 1..58: note = Engineered IL-1R-I binding polypeptide
VDAKYAKEVEAIQMEIFALPNLTRKQYTAFIRKLLDDPSQSSELLSEAKKLNDSQAPK

SEQ ID NO: 1442 - protein, 58 aa, synthetic construct
  REGION 1..58: note = Engineered IL-1R-I binding polypeptide
VDAKYAKEVVKIYFEIYDLPNLTRKQYTAFIRKLLDDPSQSSELLSEAKKLNDSQAPK

SEQ ID NO: 1443 - protein, 58 aa, synthetic construct
  REGION 1..58: note = Engineered IL-1R-I binding polypeptide
VDAKYAKEVIDVYFEIYYLPNLTRKQYTAFIRKLLDDPSQSSELLSEAKKLNDSQAPK

SEQ ID NO: 1444 - protein, 58 aa, synthetic construct
  REGION 1..58: note = Engineered IL-1R-I binding polypeptide
VDAKYAKEVVHIYFEIFGLPNLTRRQYTAFIRKLLDDPSQSSELLSEAKKLNDSQAPK

SEQ ID NO: 1445 - protein, 58 aa, synthetic construct
  REGION 1..58: note = Engineered IL-1R-I binding polypeptide
VDAKYAKEVVEVYFEIFYLPNLTRRQYTAFIRKLLDDPSQSSELLSEAKKLNDSQAPK

SEQ ID NO: 1446 - protein, 58 aa, synthetic construct
  REGION 1..58: note = Engineered IL-1R-I binding polypeptide
VDAKYAKEVVEIYFEIFALPNLTRRQYTAFIRKLLDDPSQSSELLSEAKKLNDSQAPK

SEQ ID NO: 1447 - protein, 58 aa, synthetic construct
  REGION 1..58: note = Engineered IL-1R-I binding polypeptide
VDAKYAKEVVEVYFEIFALPNLTRKQYTAFIRKLLDDPSQSSELLSEAKKLNDSQAPK

SEQ ID NO: 1448 - protein, 58 aa, synthetic construct
  REGION 1..58: note = Engineered IL-1R-I binding polypeptide
VDAKYAKEIERIYFEIYGLPNLTRKQYTAFIRKLLDDPSQSSELLSEAKKLNDSQAPK

SEQ ID NO: 1449 - protein, 58 aa, synthetic construct
  REGION 1..58: note = Engineered IL-1R-I binding polypeptide
VDAKYAKEIEKIYFEIYDLPNLTRKQYTAFIRKLLDDPSQSSELLSEAKKLNDSQAPK

SEQ ID NO: 1450 - protein, 58 aa, synthetic construct
  REGION 1..58: note = Engineered IL-1R-I binding polypeptide
VDAKYAKEIEKVYFEIYDLPNLTRRQYTAFIRKLLDDPSQSSELLSEAKKLNDSQAPK

SEQ ID NO: 1451 - protein, 58 aa, synthetic construct
  REGION 1..58: note = Engineered IL-1R-I binding polypeptide
VDAKYAKEVEKIYYEIYELPNLTRKQYTAFIRKLLDDPSQSSELLSEAKKLNDSQAPK

SEQ ID NO: 1452 - protein, 58 aa, synthetic construct
  REGION 1..58: note = Engineered IL-1R-I binding polypeptide
VDAKYAKETEHVYFEIYQLPNLTRKQYTAFIRKLLDDPSQSSELLSEAKKLNDSQAPK

SEQ ID NO: 1453 - protein, 58 aa, synthetic construct
  REGION 1..58: note = Engineered IL-1R-I binding polypeptide
VDAKYAKETEKAYYEIYDLPNLTRKQYTAFIRKLLDDPSQSSELLSEAKKLNDSQAPK

SEQ ID NO: 1454 - protein, 58 aa, synthetic construct
  REGION 1..58: note = Engineered IL-1R-I binding polypeptide
VDAKYAKETERVYYEIYSLPNLTRKQYTAFIRKLLDDPSQSSELLSEAKKLNDSQAPK

SEQ ID NO: 1455 - protein, 58 aa, synthetic construct
  REGION 1..58: note = Engineered IL-1R-I binding polypeptide
VDAKYAKETEIVYFEIFGLPNLTRKQYTAFIRKLLDDPSQSSELLSEAKKLNDSQAPK

SEQ ID NO: 1456 - protein, 58 aa, synthetic construct
  REGION 1..58: note = Engineered IL-1R-I binding polypeptide
VDAKYAKEVEFAYWEIYALPNLTRKQYTAFIRKLLDDPSQSSELLSEAKKLNDSQAPK

SEQ ID NO: 1457 - protein, 58 aa, synthetic construct
  REGION 1..58: note = Engineered IL-1R-I binding polypeptide
VDAKYAKEVEVVYFEIFALPNLTRKQYTAFIRKLLDDPSQSSELLSEAKKLNDSQAPK

SEQ ID NO: 1458 - protein, 58 aa, synthetic construct
  REGION 1..58: note = Engineered IL-1R-I binding polypeptide
VDAKYAKEVESAYFEIYDLPNLTRKQYTAFIRKLLDDPSQSSELLSEAKKLNDSQAPK

SEQ ID NO: 1459 - protein, 58 aa, synthetic construct
  REGION 1..58: note = Engineered IL-1R-I binding polypeptide
VDAKYAKEVEAVYYEIYQLPNLTRKQYTAFIRKLLDDPSQSSELLSEAKKLNDSQAPK

SEQ ID NO: 1460 - protein, 58 aa, synthetic construct; identical to SEQ ID NO: 969
  REGION 1..58: note = Engineered IL-1R-I binding polypeptide

SEQ ID NO: 1461 - protein, 58 aa, synthetic construct
  REGION 1..58: note = Engineered IL-1R-I binding polypeptide
VDAKYAKEVEDVYFEIFELPNLTRRQYTAFIRKLLDDPSQSSELLSEAKKLNDSQAPK

SEQ ID NO: 1462 - protein, 58 aa, synthetic construct
  REGION 1..58: note = Engineered IL-1R-I binding polypeptide
VDAKYAKEVETVYYEIFKLPNLTRRQYTAFIRKLLDDPSQSSELLSEAKKLNDSQAPK

SEQ ID NO: 1463 - protein, 58 aa, synthetic construct
  REGION 1..58: note = Engineered IL-1R-I binding polypeptide
VDAKYAKEVEQVYFEIYFLPNLTRKQYTAFIRKLLDDPSQSSELLSEAKKLNDSQAPK

SEQ ID NO: 1464 - protein, 58 aa, synthetic construct
  REGION 1..58: note = Engineered IL-1R-I binding polypeptide
VDAKYAKEVEEIYQEIYRLPNLTRKQYTAFIRKLLDDPSQSSELLSEAKKLNDSQAPK

SEQ ID NO: 1465 - protein, 58 aa, synthetic construct
  REGION 1..58: note = Engineered IL-1R-I binding polypeptide
VDAKYAKEVEEIYFEIFGLPNLTRKQYTAFIRKLLDDPSQSSELLSEAKKLNDSQAPK

SEQ ID NO: 1466 - protein, 58 aa, synthetic construct
  REGION 1..58: note = Engineered IL-1R-I binding polypeptide
VDAKYAKELEAVQLEIFALPNLTRKQYTAFIIKLLDDPSQSSELLSEAKKLNDSQAPK

SEQ ID NO: 1467 - protein, 58 aa, synthetic construct
  REGION 1..58: note = Engineered IL-1R-I binding polypeptide
VDAKYAKEIEKIQLEIFALPNLTRKQYTAFIIKLFDDPSQSSELLSEAKKLNDSQAPK

SEQ ID NO: 1468 - protein, 58 aa, synthetic construct
  REGION 1..58: note = Engineered IL-1R-I binding polypeptide
VDAKYAKEVEEVQLEIFALPNLTRKQYTAFIIKLLDDPSQSSELLSEAKKLNDSQAPK

SEQ ID NO: 1469 - protein, 58 aa, synthetic construct
  REGION 1..58: note = Engineered IL-1R-I binding polypeptide
VDAKYAKEVEDVQLEIFALPNLTRKQYTAFIIKLFDDPSQSSELLSEAKKLNDSQAPK

SEQ ID NO: 1470 - protein, 58 aa, synthetic construct
  REGION 1..58: note = Engineered IL-1R-I binding polypeptide
VDAKYAKEIEQVQLEIYKLPNLTRKQYTAFIIKLFDDPSQSSELLSEAKKLNDSQAPK

SEQ ID NO: 1471 - protein, 58 aa, synthetic construct
  REGION 1..58: note = Engineered IL-1R-I binding polypeptide
VDAKYAKEVEEIQLEIFHLPNLTRRQYTAFIIKLLDDPSQSSELLSEAKKLNDSQAPK

SEQ ID NO: 1472 - protein, 58 aa, synthetic construct
  REGION 1..58: note = Engineered IL-1R-I binding polypeptide
VDAKYAKELEEVQLEIFRLPNLTRRQYTAFIIKLLDDPSQSSELLSEAKKLNDSQAPK

SEQ ID NO: 1473 - protein, 58 aa, synthetic construct
  REGION 1..58: note = Engineered IL-1R-I binding polypeptide
VDAKYAKEIEDVQHEIFGLPNLTRKQYTAFIRKLFDDPSQSSELLSEAKKLNDSQAPK

SEQ ID NO: 1474 - protein, 58 aa, synthetic construct
  REGION 1..58: note = Engineered IL-1R-I binding polypeptide
VDAKYAKEVEKVQQEIFGLPNLTRKQYTAFIRKLFDDPSQSSELLSEAKKLNDSQAPK

SEQ ID NO: 1475 - protein, 58 aa, synthetic construct
  REGION 1..58: note = Engineered IL-1R-I binding polypeptide
VDAKYAKEIEAIQHEIFALPNLTRKQYTAFIRKLFDDPSQSSELLSEAKKLNDSQAPK

SEQ ID NO: 1476 - protein, 58 aa, synthetic construct
  REGION 1..58: note = Engineered IL-1R-I binding polypeptide
VDAKYAKEIEAIQHEIFVLPNLTRKQYTAFIRKLLDDPSQSSELLSEAKKLNDSQAPK

SEQ ID NO: 1477 - protein, 58 aa, synthetic construct
  REGION 1..58: note = Engineered IL-1R-I binding polypeptide
VDAKYAKEIERIQHEIFALPNLTRKQYTAFIRKLLDDPSQSSELLSEAKKLNDSQAPK

SEQ ID NO: 1478 - protein, 58 aa, synthetic construct
  REGION 1..58: note = Engineered IL-1R-I binding polypeptide
VDAKYAKEIEVIQHEIFGLPNLTRKQYTAFIRKLLDDPSQSSELLSEAKKLNDSQAPK

SEQ ID NO: 1479 - protein, 58 aa, synthetic construct
  REGION 1..58: note = Engineered IL-1R-I binding polypeptide
VDAKYAKETEDIQQEIFQLPNLTRRQYTAFIRKLLDDPSQSSELLSEAKKLNDSQAPK

SEQ ID NO: 1480 - protein, 58 aa, synthetic construct
  REGION 1..58: note = Engineered IL-1R-I binding polypeptide
VDAKYAKEVESIQQEIFQLPNLTRKQYTAFIRKLLDDPSQSSELLSEAKKLNDSQAPK

SEQ ID NO: 1481 - protein, 58 aa, synthetic construct
  REGION 1..58: note = Engineered IL-1R-I binding polypeptide
VDAKYAKEVERIQQEIFHLPNLTRKQYTAFIRKLLDDPSQSSELLSEAKKLNDSQAPK

SEQ ID NO: 1482 - protein, 58 aa, synthetic construct
  REGION 1..58: note = Engineered IL-1R-I binding polypeptide
VDAKYAKEIEEIQQEIFHLPNLTRRQYTAFIRKLLDDPSQSSELLSEAKKLNDSQAPK

SEQ ID NO: 1483 - protein, 58 aa, synthetic construct
  REGION 1..58: note = Engineered IL-1R-I binding polypeptide
VDAKYAKEVETIQHEIFRLPNLTRKQYTAFIRKLFDDPSQSSELLSEAKKLNDSQAPK

SEQ ID NO: 1484 - protein, 58 aa, synthetic construct
  REGION 1..58: note = Engineered IL-1R-I binding polypeptide
VDAKYAKETEVVQFEIFRLPNLTRRQYTAFIRKLFDDPSQSSELLSEAKKLNDSQAPK

SEQ ID NO: 1485 - protein, 58 aa, synthetic construct
  REGION 1..58: note = Engineered IL-1R-I binding polypeptide
VDAKYAKETEAVQLEIFELPNLTRKQYTAFIRKLLDDPSQSSELLSEAKKLNDSQAPK

SEQ ID NO: 1486 - protein, 58 aa, synthetic construct
  REGION 1..58: note = Engineered IL-1R-I binding polypeptide
VDAKYAKETEDVQLEIFRLPNLTRKQYTAFIRKLLDDPSQSSELLSEAKKLNDSQAPK

SEQ ID NO: 1487 - protein, 58 aa, synthetic construct
  REGION 1..58: note = Engineered IL-1R-I binding polypeptide
VDAKYAKEAEKIQFEIFSLPNLTRRQYTAFIRKLLDDPSQSSELLSEAKKLNDSQAPK

SEQ ID NO: 1488 - protein, 58 aa, synthetic construct
  REGION 1..58: note = Engineered IL-1R-I binding polypeptide
VDAKYAKETEEIQLEIYSLPNLTRRQYTAFIRKLLDDPSQSSELLSEAKKLNDSQAPK

SEQ ID NO: 1489 - protein, 58 aa, synthetic construct
  REGION 1..58: note = Engineered IL-1R-I binding polypeptide
VDAKYAKETEEIQLEIFSLPNLTRKQYTAFIRKLLDDPSQSSELLSEAKKLNDSQAPK

SEQ ID NO: 1490 - protein, 58 aa, synthetic construct
  REGION 1..58: note = Engineered IL-1R-I binding polypeptide
VDAKYAKETEKIQYEIFSLPNLTRRQYTAFIRKLLDDPSQSSELLSEAKKLNDSQAPK

SEQ ID NO: 1491 - protein, 58 aa, synthetic construct
  REGION 1..58: note = Engineered IL-1R-I binding polypeptide
VDAKYAKEIEQIQYEIFYLPNLTRKQYTAFIRKLLDDPSQSSELLSEAKKLNDSQAPK

SEQ ID NO: 1492 - protein, 58 aa, synthetic construct
  REGION 1..58: note = Engineered IL-1R-I binding polypeptide
VDAKYAKEIETVQYEIFYLPNLTRKQYTAFIRKLLDDPSQSSELLSEAKKLNDSQAPK

SEQ ID NO: 1493 - protein, 58 aa, synthetic construct
  REGION 1..58: note = Engineered IL-1R-I binding polypeptide
VDAKYAKEIEAVQYEIYYLPNLTRKQYTAFIRKLLDDPSQSSELLSEAKKLNDSQAPK

SEQ ID NO: 1494 - protein, 58 aa, synthetic construct
  REGION 1..58: note = Engineered IL-1R-I binding polypeptide
VDAKYAKELEHIQYEIFFLPNLTRKQYTAFIRKLFDDPSQSSELLSEAKKLNDSQAPK

SEQ ID NO: 1495 - protein, 58 aa, synthetic construct
  REGION 1..58: note = Engineered IL-1R-I binding polypeptide
VDAKYAKEVEEIQYEIFWLPNLTRKQYTAFIRKLLDDPSQSSELLSEAKKLNDSQAPK

SEQ ID NO: 1496 - protein, 58 aa, synthetic construct
  REGION 1..58: note = Engineered IL-1R-I binding polypeptide
VDAKYAKEVEEIQYEIFFLPNLTRKQYTAFIRKLLDDPSQSSELLSEAKKLNDSQAPK

SEQ ID NO: 1497 - protein, 58 aa, synthetic construct
  REGION 1..58: note = Engineered IL-1R-I binding polypeptide
VDAKYAKEVEEVQIEIYYLPNLTRKQYTAFIRKLLDDPSQSSELLSEAKKLNDSQAPK

SEQ ID NO: 1498 - protein, 58 aa, synthetic construct
  REGION 1..58: note = Engineered IL-1R-I binding polypeptide
VDAKYAKEVEDVQLEIYYLPNLTRKQYTAFIRKLLDDPSQSSELLSEAKKLNDSQAPK

SEQ ID NO: 1499 - protein, 58 aa, synthetic construct
  REGION 1..58: note = Engineered IL-1R-I binding polypeptide
VDAKYAKEIEEVQLEIFVLPNLTRRQYTAFIRKLFDDPSQSSELLSEAKKLNDSQAPK

SEQ ID NO: 1500 - protein, 58 aa, synthetic construct
  REGION 1..58: note = Engineered IL-1R-I binding polypeptide
VDAKYAKEIERIQMEIFYLPNLTRRQYTAFIRKLFDDPSQSSELLSEAKKLNDSQAPK

SEQ ID NO: 1501 - protein, 58 aa, synthetic construct
  REGION 1..58: note = Engineered IL-1R-I binding polypeptide
VDAKYAKELEQVQMEIFYLPNLTRKQYTAFIRKLLDDPSQSSELLSEAKKLNDSQAPK

SEQ ID NO: 1502 - protein, 58 aa, synthetic construct
  REGION 1..58: note = Engineered IL-1R-I binding polypeptide
VDAKYAKEVEEIQFEIFYLPNLTRRQYTAFIRKLLDDPSQSSELLSEAKKLNDSQAPK

SEQ ID NO: 1503 - protein, 58 aa, synthetic construct
  REGION 1..58: note = Engineered IL-1R-I binding polypeptide
VDAKYAKEIEEIQFEIFYLPNLTRRQYTAFIRKLLDDPSQSSELLSEAKKLNDSQAPK

SEQ ID NO: 1504 - protein, 58 aa, synthetic construct
  REGION 1..58: note = Engineered IL-1R-I binding polypeptide
VDAKYAKEIEEIQMEIFYLPNLTRKQYTAFIRKLLDDPSQSSELLSEAKKLNDSQAPK

SEQ ID NO: 1505 - protein, 58 aa, synthetic construct
  REGION 1..58: note = Engineered IL-1R-I binding polypeptide
VDAKYAKEIEEIQMEIYYLPNLTRRQYTAFIRKLLDDPSQSSELLSEAKKLNDSQAPK

SEQ ID NO: 1506 - protein, 58 aa, synthetic construct
  REGION 1..58: note = Engineered IL-1R-I binding polypeptide
VDAKYAKEVEEIQHEIYDLPNLTRKQYTAFIRKLLDDPSQSSELLSEAKKLNDSQAPK

SEQ ID NO: 1507 - protein, 58 aa, synthetic construct
  REGION 1..58: note = Engineered IL-1R-I binding polypeptide
VDAKYAKEIETIQLEIFDLPNLTRRQYTAFIRKLLDDPSQSSELLSEAKKLNDSQAPK

SEQ ID NO: 1508 - protein, 58 aa, synthetic construct
  REGION 1..58: note = Engineered IL-1R-I binding polypeptide
VDAKYAKEIETVQYEIYDLPNLTRKQYTAFIRKLLDDPSQSSELLSEAKKLNDSQAPK

SEQ ID NO: 1509 - protein, 58 aa, synthetic construct
  REGION 1..58: note = Engineered IL-1R-I binding polypeptide
VDAKYAKEIEEIQFEIYDLPNLTRKQYTAFIRKLFDDPSQSSELLSEAKKLNDSQAPK

SEQ ID NO: 1510 - protein, 58 aa, synthetic construct
  REGION 1..58: note = Engineered IL-1R-I binding polypeptide
VDAKYAKEVEEIQLEIYDLPNLTRKQYTAFIRKLLDDPSQSSELLSEAKKLNDSQAPK

SEQ ID NO: 1511 - protein, 58 aa, synthetic construct
  REGION 1..58: note = Engineered IL-1R-I binding polypeptide
VDAKYAKEVEEVQLEIFDLPNLTRKQYTAFIRKLLDDPSQSSELLSEAKKLNDSQAPK

SEQ ID NO: 1512 - protein, 58 aa, synthetic construct
  REGION 1..58: note = Engineered IL-1R-I binding polypeptide
VDAKYAKEIEEVQLEIFDLPNLTRRQYTAFIRKLLDDPSQSSELLSEAKKLNDSQAPK

SEQ ID NO: 1513 - protein, 58 aa, synthetic construct
  REGION 1..58: note = Engineered IL-1R-I binding polypeptide
VDAKYAKEIEEIQIEIFDLPNLTRKQYTAFIRKLLDDPSQSSELLSEAKKLNDSQAPK

SEQ ID NO: 1514 - protein, 58 aa, synthetic construct
  REGION 1..58: note = Engineered IL-1R-I binding polypeptide
VDAKYAKEVESVQFEIYHLPNLTRKQYTAFIRKLLDDPSQSSELLSEAKKLNDSQAPK

SEQ ID NO: 1515 - protein, 58 aa, synthetic construct
  REGION 1..58: note = Engineered IL-1R-I binding polypeptide
VDAKYAKEIESIQIEIFELPNLTRKQYTAFIRKLLDDPSQSSELLSEAKKLNDSQAPK

SEQ ID NO: 1516 - protein, 58 aa, synthetic construct
  REGION 1..58: note = Engineered IL-1R-I binding polypeptide
VDAKYAKEIESIQLEIFHLPNLTRKQYTAFIRKLFDDPSQSSELLSEAKKLNDSQAPK

SEQ ID NO: 1517 - protein, 58 aa, synthetic construct
  REGION 1..58: note = Engineered IL-1R-I binding polypeptide
VDAKYAKEVEDIQLEIFDLPNLTRRQYTAFIRKLLDDPSQSSELLSEAKKLNDSQAPK

SEQ ID NO: 1518 - protein, 58 aa, synthetic construct
  REGION 1..58: note = Engineered IL-1R-I binding polypeptide
VDAKYAKEVEDIQYEIFELPNLTRRQYTAFIRKLLDDPSQSSELLSEAKKLNDSQAPK

SEQ ID NO: 1519 - protein, 58 aa, synthetic construct
  REGION 1..58: note = Engineered IL-1R-I binding polypeptide
VDAKYAKEVEDIQLEIFELPNLTRRQYTAFIRKLLDDPSQSSELLSEAKKLNDSQAPK

SEQ ID NO: 1520 - protein, 58 aa, synthetic construct
  REGION 1..58: note = Engineered IL-1R-I binding polypeptide
VDAKYAKEIEDIQYEIFELPNLTRKQYTAFIRKLLDDPSQSSELLSEAKKLNDSQAPK

SEQ ID NO: 1521 - protein, 58 aa, synthetic construct
  REGION 1..58: note = Engineered IL-1R-I binding polypeptide
VDAKYAKEIEDIQLEIFELPNLTRKQYTAFIRKLLDDPSQSSELLSEAKKLNDSQAPK

SEQ ID NO: 1522 - protein, 58 aa, synthetic construct
  REGION 1..58: note = Engineered IL-1R-I binding polypeptide
VDAKYAKEIEDIQLEIYHLPNLTRKQYTAFIRKLLDDPSQSSELLSEAKKLNDSQAPK

SEQ ID NO: 1523 - protein, 58 aa, synthetic construct
  REGION 1..58: note = Engineered IL-1R-I binding polypeptide
VDAKYAKEIEDIQIEIFHLPNLTRKQYTAFIRKLLDDPSQSSELLSEAKKLNDSQAPK

SEQ ID NO: 1524 - protein, 58 aa, synthetic construct
  REGION 1..58: note = Engineered IL-1R-I binding polypeptide
VDAKYAKEIEDVQIEIFQLPNLTRKQYTAFIRKLLDDPSQSSELLSEAKKLNDSQAPK

SEQ ID NO: 1525 - protein, 58 aa, synthetic construct
  REGION 1..58: note = Engineered IL-1R-I binding polypeptide
VDAKYAKEIEDIQLEIFKLPNLTRKQYTAFIRKLLDDPSQSSELLSEAKKLNDSQAPK

SEQ ID NO: 1526 - protein, 58 aa, synthetic construct
  REGION 1..58: note = Engineered IL-1R-I binding polypeptide
VDAKYAKEIEDVQLEIFKLPNLTRRQYTAFIRKLLDDPSQSSELLSEAKKLNDSQAPK

SEQ ID NO: 1527 - protein, 58 aa, synthetic construct
  REGION 1..58: note = Engineered IL-1R-I binding polypeptide
VDAKYAKEVEKIQFEIFKLPNLTRKQYTAFIRKLLDDPSQSSELLSEAKKLNDSQAPK

SEQ ID NO: 1528 - protein, 58 aa, synthetic construct
  REGION 1..58: note = Engineered IL-1R-I binding polypeptide
VDAKYAKEIEWVQLEIFHLPNLTRKQYTAFIRKLLDDPSQSSELLSEAKKLNDSQAPK

SEQ ID NO: 1529 - protein, 58 aa, synthetic construct
  REGION 1..58: note = Engineered IL-1R-I binding polypeptide
VDAKYAKELERIQLEIFHLPNLTRKQYTAFIRKLLDDPSQSSELLSEAKKLNDSQAPK

SEQ ID NO: 1530 - protein, 58 aa, synthetic construct
  REGION 1..58: note = Engineered IL-1R-I binding polypeptide
VDAKYAKELEKIQLEIYHLPNLTRKQYTAFIRKLLDDPSQSSELLSEAKKLNDSQAPK

SEQ ID NO: 1531 - protein, 58 aa, synthetic construct
  REGION 1..58: note = Engineered IL-1R-I binding polypeptide
VDAKYAKEIEKVQIEIFQLPNLTRKQYTAFIRKLLDDPSQSSELLSEAKKLNDSQAPK

SEQ ID NO: 1532 - protein, 58 aa, synthetic construct
  REGION 1..58: note = Engineered IL-1R-I binding polypeptide
VDAKYAKEIEEIQLEIYHLPNLTRKQYTAFIRKLFDDPSQSSELLSEAKKLNDSQAPK

SEQ ID NO: 1533 - protein, 58 aa, synthetic construct
  REGION 1..58: note = Engineered IL-1R-I binding polypeptide
VDAKYAKEIEEIQLEIFRLPNLTRKQYTAFIRKLLDDPSQSSELLSEAKKLNDSQAPK

SEQ ID NO: 1534 - protein, 58 aa, synthetic construct
  REGION 1..58: note = Engineered IL-1R-I binding polypeptide
VDAKYAKEIEEIQFEIFHLPNLTRKQYTAFIRKLLDDPSQSSELLSEAKKLNDSQAPK

SEQ ID NO: 1535 - protein, 58 aa, synthetic construct
  REGION 1..58: note = Engineered IL-1R-I binding polypeptide
VDAKYAKEIEEIQYEIFHLPNLTRKQYTAFIRKLLDDPSQSSELLSEAKKLNDSQAPK

SEQ ID NO: 1536 - protein, 58 aa, synthetic construct
  REGION 1..58: note = Engineered IL-1R-I binding polypeptide
VDAKYAKEIEEIQLEIFHLPNLTRKQYTAFIRKLLDDPSQSSELLSEAKKLNDSQAPK

SEQ ID NO: 1537 - protein, 58 aa, synthetic construct
  REGION 1..58: note = Engineered IL-1R-I binding polypeptide
VDAKYAKELEEIQLEIYKLPNLTRRQYTAFIRKLLDDPSQSSELLSEAKKLNDSQAPK

SEQ ID NO: 1538 - protein, 58 aa, synthetic construct
  REGION 1..58: note = Engineered IL-1R-I binding polypeptide
VDAKYAKELEEIQLEIYHLPNLTRRQYTAFIRKLLDDPSQSSELLSEAKKLNDSQAPK

SEQ ID NO: 1539 - protein, 58 aa, synthetic construct
  REGION 1..58: note = Engineered IL-1R-I binding polypeptide
VDAKYAKEIEQVQLEIFHLPNLTRRQYTAFIRKLLDDPSQSSELLSEAKKLNDSQAPK

SEQ ID NO: 1540 - protein, 58 aa, synthetic construct
  REGION 1..58: note = Engineered IL-1R-I binding polypeptide
VDAKYAKEIEEVQMEIFHLPNLTRRQYTAFIRKLLDDPSQSSELLSEAKKLNDSQAPK

SEQ ID NO: 1541 - protein, 58 aa, synthetic construct
  REGION 1..58: note = Engineered IL-1R-I binding polypeptide
VDAKYAKEVEEIQIEIFKLPNLTRKQYTAFIRKLFDDPSQSSELLSEAKKLNDSQAPK

SEQ ID NO: 1542 - protein, 58 aa, synthetic construct
  REGION 1..58: note = Engineered IL-1R-I binding polypeptide
VDAKYAKEVEEVQLEIFKLPNLTRKQYTAFIRKLLDDPSQSSELLSEAKKLNDSQAPK

SEQ ID NO: 1543 - protein, 58 aa, synthetic construct
  REGION 1..58: note = Engineered IL-1R-I binding polypeptide
VDAKYAKEVEEIQVEIFQLPNLTRKQYTAFIRKLFDDPSQSSELLSEAKKLNDSQAPK

SEQ ID NO: 1544 - protein, 58 aa, synthetic construct
  REGION 1..58: note = Engineered IL-1R-I binding polypeptide
VDAKYAKEVEEVQLEIFHLPNLTRKQYTAFIRKLFDDPSQSSELLSEAKKLNDSQAPK

SEQ ID NO: 1545 - protein, 58 aa, synthetic construct
  REGION 1..58: note = Engineered IL-1R-I binding polypeptide
VDAKYAKEVEEIQLEIFHLPNLTRKQYTAFIRKLFDDPSQSSELLSEAKKLNDSQAPK

SEQ ID NO: 1546 - protein, 58 aa, synthetic construct
  REGION 1..58: note = Engineered IL-1R-I binding polypeptide
VDAKYAKEVEEVQIEIFQLPNLTRRQYTAFIRKLLDDPSQSSELLSEAKKLNDSQAPK

SEQ ID NO: 1547 - protein, 58 aa, synthetic construct
  REGION 1..58: note = Engineered IL-1R-I binding polypeptide
VDAKYAKEVEEVQIEIFELPNLTRKQYTAFIRKLLDDPSQSSELLSEAKKLNDSQAPK

SEQ ID NO: 1548 - protein, 58 aa, synthetic construct
  REGION 1..58: note = Engineered IL-1R-I binding polypeptide
VDAKYAKEVEEIQLEIFRLPNLTRRQYTAFIRKLLDDPSQSSELLSEAKKLNDSQAPK

SEQ ID NO: 1549 - protein, 58 aa, synthetic construct
  REGION 1..58: note = Engineered IL-1R-I binding polypeptide
VDAKYAKEVEEVQLEIYSLPNLTRRQYTAFIRKLLDDPSQSSELLSEAKKLNDSQAPK

SEQ ID NO: 1550 - protein, 58 aa, synthetic construct
  REGION 1..58: note = Engineered IL-1R-I binding polypeptide
VDAKYAKEIEQIQLEIFSLPNLTRRQYTAFIRKLFDDPSQSSELLSEAKKLNDSQAPK

SEQ ID NO: 1551 - protein, 58 aa, synthetic construct
  REGION 1..58: note = Engineered IL-1R-I binding polypeptide
VDAKYAKELEDVQLEIFSLPNLTRRQYTAFIRKLLDDPSQSSELLSEAKKLNDSQAPK

SEQ ID NO: 1552 - protein, 58 aa, synthetic construct
  REGION 1..58: note = Engineered IL-1R-I binding polypeptide
VDAKYAKEIEQIQMEIFSLPNLTRKQYTAFIRKLLDDPSQSSELLSEAKKLNDSQAPK

SEQ ID NO: 1553 - protein, 58 aa, synthetic construct
  REGION 1..58: note = Engineered IL-1R-I binding polypeptide
VDAKYAKEIEEVQLEIFSLPNLTRKQYTAFIRKLLDDPSQSSELLSEAKKLNDSQAPK

SEQ ID NO: 1554 - protein, 58 aa, synthetic construct
  REGION 1..58: note = Engineered IL-1R-I binding polypeptide
VDAKYAKEIEEIQLEIFSLPNLTRKQYTAFIRKLLDDPSQSSELLSEAKKLNDSQAPK

SEQ ID NO: 1555 - protein, 58 aa, synthetic construct
  REGION 1..58: note = Engineered IL-1R-I binding polypeptide
VDAKYAKEIEDIQVEIYGLPNLTRRQYTAFIRKLLDDPSQSSELLSEAKKLNDSQAPK

SEQ ID NO: 1556 - protein, 58 aa, synthetic construct
  REGION 1..58: note = Engineered IL-1R-I binding polypeptide
VDAKYAKELETVQLEIFGLPNLTRRQYTAFIRKLLDDPSQSSELLSEAKKLNDSQAPK

SEQ ID NO: 1557 - protein, 58 aa, synthetic construct
  REGION 1..58: note = Engineered IL-1R-I binding polypeptide
VDAKYAKEIETIQLEIFGLPNLTRKQYTAFIRKLLDDPSQSSELLSEAKKLNDSQAPK

SEQ ID NO: 1558 - protein, 58 aa, synthetic construct
  REGION 1..58: note = Engineered IL-1R-I binding polypeptide
VDAKYAKEIEQVQLEIFGLPNLTRKQYTAFIRKLLDDPSQSSELLSEAKKLNDSQAPK

SEQ ID NO: 1559 - protein, 58 aa, synthetic construct
  REGION 1..58: note = Engineered IL-1R-I binding polypeptide
VDAKYAKEIESVQLEIFGLPNLTRRQYTAFIRKLLDDPSQSSELLSEAKKLNDSQAPK

SEQ ID NO: 1560 - protein, 58 aa, synthetic construct
  REGION 1..58: note = Engineered IL-1R-I binding polypeptide
VDAKYAKEIEEVQLEIFGLPNLTRKQYTAFIRKLLDDPSQSSELLSEAKKLNDSQAPK

SEQ ID NO: 1561 - protein, 58 aa, synthetic construct
  REGION 1..58: note = Engineered IL-1R-I binding polypeptide
VDAKYAKEVEEIQLEIFGLPNLTRKQYTAFIRKLLDDPSQSSELLSEAKKLNDSQAPK

SEQ ID NO: 1562 - protein, 58 aa, synthetic construct
  REGION 1..58: note = Engineered IL-1R-I binding polypeptide
VDAKYAKEVEEVQFEIFGLPNLTRKQYTAFIRKLLDDPSQSSELLSEAKKLNDSQAPK

SEQ ID NO: 1563 - protein, 58 aa, synthetic construct
  REGION 1..58: note = Engineered IL-1R-I binding polypeptide
VDAKYAKEVEEIQFEIFGLPNLTRKQYTAFIRKLLDDPSQSSELLSEAKKLNDSQAPK

SEQ ID NO: 1564 - protein, 58 aa, synthetic construct
  REGION 1..58: note = Engineered IL-1R-I binding polypeptide
VDAKYAKEVEEIQYEIFGLPNLTRKQYTAFIRKLLDDPSQSSELLSEAKKLNDSQAPK

SEQ ID NO: 1565 - protein, 58 aa, synthetic construct
  REGION 1..58: note = Engineered IL-1R-I binding polypeptide
VDAKYAKEVEEIQLEIFGLPNLTRRQYTAFIRKLLDDPSQSSELLSEAKKLNDSQAPK

SEQ ID NO: 1566 - protein, 58 aa, synthetic construct
  REGION 1..58: note = Engineered IL-1R-I binding polypeptide
VDAKYAKETEEVQYEIFALPNLTRKQYTAFIRKLLDDPSQSSELLSEAKKLNDSQAPK

SEQ ID NO: 1567 - protein, 58 aa, synthetic construct
  REGION 1..58: note = Engineered IL-1R-I binding polypeptide
VDAKYAKETEHIQYEIFALPNLTRKQYTAFIRKLLDDPSQSSELLSEAKKLNDSQAPK

SEQ ID NO: 1568 - protein, 58 aa, synthetic construct
  REGION 1..58: note = Engineered IL-1R-I binding polypeptide
VDAKYAKETEQVQYEIFALPNLTRKQYTAFIRKLLDDPSQSSELLSEAKKLNDSQAPK

SEQ ID NO: 1569 - protein, 58 aa, synthetic construct
  REGION 1..58: note = Engineered IL-1R-I binding polypeptide
VDAKYAKETEKIQFEIFALPNLTRKQYTAFIRKLLDDPSQSSELLSEAKKLNDSQAPK

SEQ ID NO: 1570 - protein, 58 aa, synthetic construct
  REGION 1..58: note = Engineered IL-1R-I binding polypeptide
VDAKYAKETEEIQLEIYALPNLTRRQYTAFIRKLLDDPSQSSELLSEAKKLNDSQAPK

SEQ ID NO: 1571 - protein, 58 aa, synthetic construct
  REGION 1..58: note = Engineered IL-1R-I binding polypeptide
VDAKYAKETEEIQMEIFALPNLTRRQYTAFIRKLLDDPSQSSELLSEAKKLNDSQAPK

SEQ ID NO: 1572 - protein, 58 aa, synthetic construct
  REGION 1..58: note = Engineered IL-1R-I binding polypeptide
VDAKYAKEIESIQYEIFALPNLTRKQYTAFIRKLFDDPSQSSELLSEAKKLNDSQAPK

SEQ ID NO: 1573 - protein, 58 aa, synthetic construct
  REGION 1..58: note = Engineered IL-1R-I binding polypeptide
VDAKYAKEIESVQLEIFALPNLTRKQYTAFIRKLFDDPSQSSELLSEAKKLNDSQAPK

SEQ ID NO: 1574 - protein, 58 aa, synthetic construct
  REGION 1..58: note = Engineered IL-1R-I binding polypeptide
VDAKYAKEIESIQLEIFALPNLTRKQYTAFIRKLFDDPSQSSELLSEAKKLNDSQAPK

SEQ ID NO: 1575 - protein, 58 aa, synthetic construct
  REGION 1..58: note = Engineered IL-1R-I binding polypeptide
VDAKYAKELESVQLEIFALPNLTRKQYTAFIRKLLDDPSQSSELLSEAKKLNDSQAPK

SEQ ID NO: 1576 - protein, 58 aa, synthetic construct
  REGION 1..58: note = Engineered IL-1R-I binding polypeptide
VDAKYAKEIETIQYEIFALPNLTRKQYTAFIRKLLDDPSQSSELLSEAKKLNDSQAPK

SEQ ID NO: 1577 - protein, 58 aa, synthetic construct
  REGION 1..58: note = Engineered IL-1R-I binding polypeptide
VDAKYAKEVETVQYEIFALPNLTRKQYTAFIRKLLDDPSQSSELLSEAKKLNDSQAPK

SEQ ID NO: 1578 - protein, 58 aa, synthetic construct
  REGION 1..58: note = Engineered IL-1R-I binding polypeptide
VDAKYAKEIEQIQYEIFALPNLTRKQYTAFIRKLLDDPSQSSELLSEAKKLNDSQAPK

SEQ ID NO: 1579 - protein, 58 aa, synthetic construct
  REGION 1..58: note = Engineered IL-1R-I binding polypeptide
VDAKYAKEIEHVQYEIFALPNLTRKQYTAFIRKLLDDPSQSSELLSEAKKLNDSQAPK

SEQ ID NO: 1580 - protein, 58 aa, synthetic construct
  REGION 1..58: note = Engineered IL-1R-I binding polypeptide
VDAKYAKEIEHIQLEIFALPNLTRKQYTAFIRKLFDDPSQSSELLSEAKKLNDSQAPK

SEQ ID NO: 1581 - protein, 58 aa, synthetic construct
  REGION 1..58: note = Engineered IL-1R-I binding polypeptide
VDAKYAKEVEKVQLEIFALPNLTRKQYTAFIRKLFDDPSQSSELLSEAKKLNDSQAPK

SEQ ID NO: 1582 - protein, 58 aa, synthetic construct
  REGION 1..58: note = Engineered IL-1R-I binding polypeptide
VDAKYAKEIEEVQLEIYALPNLTRRQYTAFIRKLLDDPSQSSELLSEAKKLNDSQAPK

SEQ ID NO: 1583 - protein, 58 aa, synthetic construct
  REGION 1..58: note = Engineered IL-1R-I binding polypeptide
VDAKYAKEVEQVQFEIFALPNLTRKQYTAFIRKLLDDPSQSSELLSEAKKLNDSQAPK

SEQ ID NO: 1584 - protein, 58 aa, synthetic construct
  REGION 1..58: note = Engineered IL-1R-I binding polypeptide
VDAKYAKEVEQIQLEIFALPNLTRKQYTAFIRKLLDDPSQSSELLSEAKKLNDSQAPK

SEQ ID NO: 1585 - protein, 58 aa, synthetic construct
  REGION 1..58: note = Engineered IL-1R-I binding polypeptide
VDAKYAKEVEEVQYEIFALPNLTRKQYTAFIRKLLDDPSQSSELLSEAKKLNDSQAPK

SEQ ID NO: 1586 - protein, 58 aa, synthetic construct
  REGION 1..58: note = Engineered IL-1R-I binding polypeptide
VDAKYAKEVEEIQLEIYALPNLTRKQYTAFIRKLLDDPSQSSELLSEAKKLNDSQAPK

SEQ ID NO: 1587 - protein, 58 aa, synthetic construct
  REGION 1..58: note = Engineered IL-1R-I binding polypeptide
VDAKYAKEVEEIQLEIFALPNLTRKQYTAFIRKLLDDPSQSSELLSEAKKLNDSQAPK

SEQ ID NO: 1588 - protein, 58 aa, synthetic construct
  REGION 1..58: note = Engineered IL-1R-I binding polypeptide
VDAKYAKEVEEVQLEIFALPNLTRKQYTAFIRKLLDDPSQSSELLSEAKKLNDSQAPK

SEQ ID NO: 1589 - protein, 58 aa, synthetic construct
  REGION 1..58: note = Engineered IL-1R-I binding polypeptide
VDAKYAKEVEEIQLEIFALPNLTRRQYTAFIRKLLDDPSQSSELLSEAKKLNDSQAPK

SEQ ID NO: 1590 - protein, 58 aa, synthetic construct
  REGION 1..58: note = Engineered IL-1R-I binding polypeptide
VDAKYAKEIEEIQFEIFALPNLTRKQYTAFIRKLLDDPSQSSELLSEAKKLNDSQAPK

SEQ ID NO: 1591 - protein, 58 aa, synthetic construct
  REGION 1..58: note = Engineered IL-1R-I binding polypeptide
VDAKYAKEIEEIQLEIFALPNLTRKQYTAFIRKLLDDPSQSSELLSEAKKLNDSQAPK

SEQ ID NO: 1592 - protein, 58 aa, synthetic construct
  REGION 1..58: note = Engineered IL-1R-I binding polypeptide
VDAKYAKEIEDVQLEIFALPNLTRKQYTAFIRKLLDDPSQSSELLSEAKKLNDSQAPK

SEQ ID NO: 1593 - protein, 58 aa, synthetic construct
  REGION 1..58: note = Engineered IL-1R-I binding polypeptide
VDAKYAKEIEDIQLEIFGLPNLTRKQYTAFIRKLLDDPSQSSELLSEAKKLNDSQAPK

SEQ ID NO: 1594 - protein, 58 aa, synthetic construct
  REGION 1..58: note = Engineered IL-1R-I binding polypeptide
VDAKYAKEVEDIQLEIFALPNLTRRQYTAFIRKLLDDPSQSSELLSEAKKLNDSQAPK

SEQ ID NO: 1595 - protein, 58 aa, synthetic construct
  REGION 1..58: note = Engineered IL-1R-I binding polypeptide
VDAKYAKETEVVQYEIFALPNLTRKQYTAFIRKLLDDPSQSSELLSEAKKLNDSQAPK

SEQ ID NO: 1596 - protein, 58 aa, synthetic construct
  REGION 1..58: note = Engineered IL-1R-I binding polypeptide
VDAKYAKEAEIVQYEIFALPNLTRKQYTAFIRKLLDDPSQSSELLSEAKKLNDSQAPK

SEQ ID NO: 1597 - protein, 58 aa, synthetic construct
  REGION 1..58: note = Engineered IL-1R-I binding polypeptide
VDAKYAKEVEFVQYEIFQLPNLTRRQYTAFIRKLLDDPSQSSELLSEAKKLNDSQAPK

SEQ ID NO: 1598 - protein, 58 aa, synthetic construct
  REGION 1..58: note = Engineered IL-1R-I binding polypeptide
VDAKYAKEIEIVQFEIFHLPNLTRKQYTAFIRKLLDDPSQSSELLSEAKKLNDSQAPK

SEQ ID NO: 1599 - protein, 58 aa, synthetic construct
  REGION 1..58: note = Engineered IL-1R-I binding polypeptide
VDAKYAKEVEIIQLEIFHLPNLTRRQYTAFIRKLLDDPSQSSELLSEAKKLNDSQAPK

SEQ ID NO: 1600 - protein, 58 aa, synthetic construct
  REGION 1..58: note = Engineered IL-1R-I binding polypeptide
VDAKYAKEVETIQLEIFALPNLTRRQYTAFIRKLLDDPSQSSELLSEAKKLNDSQAPK

SEQ ID NO: 1601 - protein, 58 aa, synthetic construct
  REGION 1..58: note = Engineered IL-1R-I binding polypeptide
VDAKYAKEVEYIQLEIFALPNLTRRQYTAFIRKLLDDPSQSSELLSEAKKLNDSQAPK

SEQ ID NO: 1602 - protein, 58 aa, synthetic construct
  REGION 1..58: note = Engineered IL-1R-I binding polypeptide
VDAKYAKEIELIQLEIYALPNLTRKQYTAFIRKLFDDPSQSSELLSEAKKLNDSQAPK

SEQ ID NO: 1603 - protein, 58 aa, synthetic construct
  REGION 1..58: note = Engineered IL-1R-I binding polypeptide
VDAKYAKEIEYVQFEIFALPNLTRKQYTAFIRKLLDDPSQSSELLSEAKKLNDSQAPK

SEQ ID NO: 1604 - protein, 58 aa, synthetic construct
  REGION 1..58: note = Engineered IL-1R-I binding polypeptide
VDAKYAKEIEVIQYEIFALPNLTRRQYTAFIRKLLDDPSQSSELLSEAKKLNDSQAPK

SEQ ID NO: 1605 - protein, 58 aa, synthetic construct
  REGION 1..58: note = Engineered IL-1R-I binding polypeptide
VDAKYAKEIEVIQLEIFALPNLTRRQYTAFIRKLLDDPSQSSELLSEAKKLNDSQAPK

SEQ ID NO: 1606 - protein, 58 aa, synthetic construct
  REGION 1..58: note = Engineered IL-1R-I binding polypeptide
VDAKYAKEIEVIQLEIFALPNLTRKQYTAFIRKLFDDPSQSSELLSEAKKLNDSQAPK

SEQ ID NO: 1607 - protein, 58 aa, synthetic construct
  REGION 1..58: note = Engineered IL-1R-I binding polypeptide
VDAKYAKEVEYIQMEIFALPNLTRKQYTAFIRKLFDDPSQSSELLSEAKKLNDSQAPK

SEQ ID NO: 1608 - protein, 58 aa, synthetic construct
  REGION 1..58: note = Engineered IL-1R-I binding polypeptide
VDAKYAKEVEIVQFEIFALPNLTRKQYTAFIRKLLDDPSQSSELLSEAKKLNDSQAPK

SEQ ID NO: 1609 - protein, 58 aa, synthetic construct
  REGION 1..58: note = Engineered IL-1R-I binding polypeptide
VDAKYAKEVEVIQLEIYALPNLTRKQYTAFIRKLLDDPSQSSELLSEAKKLNDSQAPK

SEQ ID NO: 1610 - protein, 58 aa, synthetic construct
  REGION 1..58: note = Engineered IL-1R-I binding polypeptide
VDAKYAKEVEVIQYEIFALPNLTRKQYTAFIRKLLDDPSQSSELLSEAKKLNDSQAPK

SEQ ID NO: 1611 - protein, 58 aa, synthetic construct
  REGION 1..58: note = Engineered IL-1R-I binding polypeptide
VDAKYAKEVEVIQLEIFSLPNLTRRQYTAFIRKLLDDPSQSSELLSEAKKLNDSQAPK

SEQ ID NO: 1612 - protein, 58 aa, synthetic construct
  REGION 1..58: note = Engineered IL-1R-I binding polypeptide
VDAKYAKELEIIQLEIFSLPNLTRKQYTAFIRKLLDDPSQSSELLSEAKKLNDSQAPK

SEQ ID NO: 1613 - protein, 58 aa, synthetic construct
  REGION 1..58: note = Engineered IL-1R-I binding polypeptide
VDAKYAKEIEVVQLEIFGLPNLTRKQYTAFIRKLLDDPSQSSELLSEAKKLNDSQAPK

SEQ ID NO: 1614 - protein, 58 aa, synthetic construct
  REGION 1..58: note = Engineered IL-1R-I binding polypeptide
VDAKYAKEIEVVQLEIFGLPNLTRRQYTAFIRKLLDDPSQSSELLSEAKKLNDSQAPK

SEQ ID NO: 1615 - protein, 58 aa, synthetic construct
  REGION 1..58: note = Engineered IL-1R-I binding polypeptide
VDAKYAKEIEIIQMEIFGLPNLTRKQYTAFIRKLLDDPSQSSELLSEAKKLNDSQAPK

SEQ ID NO: 1616 - protein, 58 aa, synthetic construct
  REGION 1..58: note = Engineered IL-1R-I binding polypeptide
VDAKYAKEVEVVQFEIYGLPNLTRKQYTAFIRKLLDDPSQSSELLSEAKKLNDSQAPK

SEQ ID NO: 1617 - protein, 58 aa, synthetic construct
  REGION 1..58: note = Engineered IL-1R-I binding polypeptide
VDAKYAKEVEYVQLEIYGLPNLTRKQYTAFIRKLLDDPSQSSELLSEAKKLNDSQAPK

SEQ ID NO: 1618 - protein, 58 aa, synthetic construct
  REGION 1..58: note = Engineered IL-1R-I binding polypeptide
VDAKYAKEVEIIQYEIFGLPNLTRKQYTAFIRKLLDDPSQSSELLSEAKKLNDSQAPK

SEQ ID NO: 1619 - protein, 58 aa, synthetic construct
  REGION 1..58: note = Engineered IL-1R-I binding polypeptide
VDAKYAKELEAIQMEIFVLPNLTRRQYTAFIRKLLDDPSQSSELLSEAKKLNDSQAPK

SEQ ID NO: 1620 - protein, 58 aa, synthetic construct
  REGION 1..58: note = Engineered IL-1R-I binding polypeptide
VDAKYAKEVEAIQMEIFFLPNLTRRQYTAFIRKLLDDPSQSSELLSEAKKLNDSQAPK

SEQ ID NO: 1621 - protein, 58 aa, synthetic construct
  REGION 1..58: note = Engineered IL-1R-I binding polypeptide
VDAKYAKELEAIQLEIYELPNLTRKQYTAFIRKLLDDPSQSSELLSEAKKLNDSQAPK

SEQ ID NO: 1622 - protein, 58 aa, synthetic construct
  REGION 1..58: note = Engineered IL-1R-I binding polypeptide
VDAKYAKEVEAIQFEIFQLPNLTRKQYTAFIRKLLDDPSQSSELLSEAKKLNDSQAPK

SEQ ID NO: 1623 - protein, 58 aa, synthetic construct
  REGION 1..58: note = Engineered IL-1R-I binding polypeptide
VDAKYAKEVEAIQFEIYHLPNLTRKQYTAFIRKLLDDPSQSSELLSEAKKLNDSQAPK

SEQ ID NO: 1624 - protein, 58 aa, synthetic construct
  REGION 1..58: note = Engineered IL-1R-I binding polypeptide
VDAKYAKEVEAIQLEIYHLPNLTRKQYTAFIRKLFDDPSQSSELLSEAKKLNDSQAPK

SEQ ID NO: 1625 - protein, 58 aa, synthetic construct
  REGION 1..58: note = Engineered IL-1R-I binding polypeptide
VDAKYAKEIEAVQIEIFRLPNLTRKQYTAFIRKLLDDPSQSSELLSEAKKLNDSQAPK

SEQ ID NO: 1626 - protein, 58 aa, synthetic construct
  REGION 1..58: note = Engineered IL-1R-I binding polypeptide
VDAKYAKEIEAIQLEIFHLPNLTRKQYTAFIRKLFDDPSQSSELLSEAKKLNDSQAPK

SEQ ID NO: 1627 - protein, 58 aa, synthetic construct
  REGION 1..58: note = Engineered IL-1R-I binding polypeptide
VDAKYAKEIEAIQMEIFHLPNLTRKQYTAFIRKLFDDPSQSSELLSEAKKLNDSQAPK

SEQ ID NO: 1628 - protein, 58 aa, synthetic construct
  REGION 1..58: note = Engineered IL-1R-I binding polypeptide
VDAKYAKEVEAIQMEIFQLPNLTRRQYTAFIRKLLDDPSQSSELLSEAKKLNDSQAPK

SEQ ID NO: 1629 - protein, 58 aa, synthetic construct
  REGION 1..58: note = Engineered IL-1R-I binding polypeptide
VDAKYAKEIEAIQYEIFALPNLTRKQYTAFIRKLLDDPSQSSELLSEAKKLNDSQAPK

SEQ ID NO: 1630 - protein, 58 aa, synthetic construct
  REGION 1..58: note = Engineered IL-1R-I binding polypeptide
VDAKYAKEIEAIQLEIYALPNLTRKQYTAFIRKLLDDPSQSSELLSEAKKLNDSQAPK

SEQ ID NO: 1631 - protein, 58 aa, synthetic construct
  REGION 1..58: note = Engineered IL-1R-I binding polypeptide
VDAKYAKEIEAIQLEIFALPNLTRKQYTAFIRKLLDDPSQSSELLSEAKKLNDSQAPK

SEQ ID NO: 1632 - protein, 58 aa, synthetic construct
  REGION 1..58: note = Engineered IL-1R-I binding polypeptide
VDAKYAKEVEAVQLEIFALPNLTRRQYTAFIRKLLDDPSQSSELLSEAKKLNDSQAPK

SEQ ID NO: 1633 - protein, 58 aa, synthetic construct
  REGION 1..58: note = Engineered IL-1R-I binding polypeptide
AEAKYAKEAEEAYYEIFGLPNLTRRQYTAFIRKLLDDPSQSSELLSEAKKLNDSQAPK

SEQ ID NO: 1634 - protein, 58 aa, synthetic construct
  REGION 1..58: note = Engineered IL-1R-I binding polypeptide
AEAKYAKEADAAYMEIFGLPNLTRKQYTAFIRKLLDDPSQSSELLSEAKKLNDSQAPK

SEQ ID NO: 1635 - protein, 58 aa, synthetic construct
  REGION 1..58: note = Engineered IL-1R-I binding polypeptide
AEAKYAKEIEAVQMEIFYLPNLTRKQYTAFIRKLFDDPSQSSELLSEAKKLNDSQAPK

SEQ ID NO: 1636 - protein, 58 aa, synthetic construct
  REGION 1..58: note = Engineered IL-1R-I binding polypeptide
AEAKYAKEIEAAQMEIFGLPNLTRKQYTAFIRKLFDDPSQSSELLSEAKKLNDSQAPK

SEQ ID NO: 1637 - protein, 58 aa, synthetic construct
  REGION 1..58: note = Engineered IL-1R-I binding polypeptide
AEAKYAKELEAAYMEIYYLPNLTRKQYTAFIRKLLDDPSQSSELLSEAKKLNDSQAPK

SEQ ID NO: 1638 - protein, 58 aa, synthetic construct
  REGION 1..58: note = Engineered IL-1R-I binding polypeptide
AEAKYAKEAEKAYYEIFNLPNLTRKQYTAFIRKLLDDPSQSSELLSEAKKLNDSQAPK

SEQ ID NO: 1639 - protein, 108 aa, synthetic construct
  REGION 1..108: note = Engineered IL-1R-I binding polypeptide
AEAKYAKEAHRAQMEIFALPNLTRRQYTAFIRKLLDDPSQSSELLSEAKKLSESQAPKVEGSLAEAKEAANAELDSYGVSDFYKRLIDKAKTVEGVEALKDAILAALP

SEQ ID NO: 1640 - protein, 108 aa, synthetic construct
  REGION 1..108: note = Engineered IL-1R-I binding polypeptide
AEAKYAKEALSAQQEIFALPNLTRRQYTAFIRKLLDDPSQSSELLSEAKKLSESQAPKVEGSLAEAKEAANAELDSYGVSDFYKRLIDKAKTVEGVEALKDAILAALP

SEQ ID NO: 1641 - protein, 108 aa, synthetic construct
  REGION 1..108: note = Engineered IL-1R-I binding polypeptide
ASLAEAKEAANAELDSYGVSDFYKRLIDKAKTVEGVEALKDAILAALPGSAEAKYAKEAHRAQMEIFALPNLTRRQYTAFIRKLLDDPSQSSELLSEAKKLSESQAPK

SEQ ID NO: 1642 - protein, 116 aa, synthetic construct
  REGION 1..116: note = Engineered IL-1R-I binding polypeptide
ASLAEAKEAANAELDSYGVSDFYKRLIDKAKTVEGVEALKDAILAALPGGGGSGGGGSAEAKYAKEAHRAQMEIFALPNLTRRQYTAFIRKLLDDPSQSSELLSEAKKLSESQAPK

SEQ ID NO: 1643 - protein, 106 aa, synthetic construct
  REGION 1..106: note = Engineered IL-1R-I binding polypeptide
ASLAEAKEAANAELDSYGVSDFYKRLIDKAKTVEGVEALKDAILAALPAEAKYAKEAHRAQMEIFALPNLTRRQYTAFIRKLLDDPSQSSELLSEAKKLSESQAPK

SEQ ID NO: 1644 - protein, 103 aa, synthetic construct
  REGION 1..103: note = Engineered IL-1R-I binding polypeptide
ASLAEAKEAANAELDSYGVSDFYKRLIDKAKTVEGVEALKDAILAALPKYAKEAHRAQMEIFALPNLTRRQYTAFIRKLLDDPSQSSELLSEAKKLSESQAPK

SEQ ID NO: 1645 - protein, 146 aa, synthetic construct
  REGION 1..146: note = Engineered IL-1R-I binding polypeptide
ASLAEAKEAANAELDSYGVSDFYKRLIDKAKTVEGVEALKDAILAALPKEAAAKEAAAKEAAAKELAAKEAAAKEAAAKEAAAKELAAAEAKYAKEAHRAQMEIFALPNLTRRQYTAFIRKLLDDPSQSSELLSEAKKLSESQAPK

SEQ ID NO: 1646 - protein, 297 aa, synthetic construct
  REGION 1..297: note = Engineered IL-1R-I binding polypeptide
AEAKYAKEIEEVQMEIFYLPNLTRRQYTAFIRKLLDDPSQSSELLSEAKKLSESQAPKASGGGGSGGGGSDKTHTCPPCPAPELLGGPSVFLFPPKPKDTLMISRTPEVTCVVVDVSHEDPEVKFNWYVDGVEVHNAKTKPREEQYNSTYRVVSVLTVLHQDWLNGKEYKCKVSNKALPAPIEKTISKAKGQPREPQVYTLPPSRDELTKNQVSLTCLVKGFYPSDIAVEWESNGQPENNYKTTPPVLDSDGSFFLYSKLTVDKSRWQQGNVFSCSVMHEALHNHYTQKSLSLSPGK

SEQ ID NO: 1647 - protein, 297 aa, synthetic construct
  REGION 1..297: note = Engineered IL-1R-I binding polypeptide
AEAKYAKEIEEIQMEIFHLPNLTRRQYTAFIRKLLDDPSQSSELLSEAKKLSESQAPKASGGGGSGGGGSDKTHTCPPCPAPELLGGPSVFLFPPKPKDTLMISRTPEVTCVVVDVSHEDPEVKFNWYVDGVEVHNAKTKPREEQYNSTYRVVSVLTVLHQDWLNGKEYKCKVSNKALPAPIEKTISKAKGQPREPQVYTLPPSRDELTKNQVSLTCLVKGFYPSDIAVEWESNGQPENNYKTTPPVLDSDGSFFLYSKLTVDKSRWQQGNVFSCSVMHEALHNHYTQKSLSLSPGK

SEQ ID NO: 1648 - protein, 297 aa, synthetic construct
  REGION 1..297: note = Engineered IL-1R-I binding polypeptide
AEAKYAKEVEEIQMEIFRLPNLTRRQYTAFIRKLLDDPSQSSELLSEAKKLSESQAPKASGGGGSGGGGSDKTHTCPPCPAPELLGGPSVFLFPPKPKDTLMISRTPEVTCVVVDVSHEDPEVKFNWYVDGVEVHNAKTKPREEQYNSTYRVVSVLTVLHQDWLNGKEYKCKVSNKALPAPIEKTISKAKGQPREPQVYTLPPSRDELTKNQVSLTCLVKGFYPSDIAVEWESNGQPENNYKTTPPVLDSDGSFFLYSKLTVDKSRWQQGNVFSCSVMHEALHNHYTQKSLSLSPGK

SEQ ID NO: 1649 - protein, 297 aa, synthetic construct
  REGION 1..297: note = Engineered IL-1R-I binding polypeptide
AEAKYAKEVEDIQLEIFALPNLTRRQYTAFIRKLLDDPSQSSELLSEAKKLSESQAPKASGGGGSGGGGSDKTHTCPPCPAPELLGGPSVFLFPPKPKDTLMISRTPEVTCVVVDVSHEDPEVKFNWYVDGVEVHNAKTKPREEQYNSTYRVVSVLTVLHQDWLNGKEYKCKVSNKALPAPIEKTISKAKGQPREPQVYTLPPSRDELTKNQVSLTCLVKGFYPSDIAVEWESNGQPENNYKTTPPVLDSDGSFFLYSKLTVDKSRWQQGNVFSCSVMHEALHNHYTQKSLSLSPGK

SEQ ID NO: 1650 - protein, 297 aa, synthetic construct
  REGION 1..297: note = Engineered IL-1R-I binding polypeptide
AEAKYAKELEAIQMEIFHLPNLTRRQYTAFIRKLLDDPSQSSELLSEAKKLSESQAPKASGGGGSGGGGSDKTHTCPPCPAPELLGGPSVFLFPPKPKDTLMISRTPEVTCVVVDVSHEDPEVKFNWYVDGVEVHNAKTKPREEQYNSTYRVVSVLTVLHQDWLNGKEYKCKVSNKALPAPIEKTISKAKGQPREPQVYTLPPSRDELTKNQVSLTCLVKGFYPSDIAVEWESNGQPENNYKTTPPVLDSDGSFFLYSKLTVDKSRWQQGNVFSCSVMHEALHNHYTQKSLSLSPGK

SEQ ID NO: 1651 - protein, 297 aa, synthetic construct
  REGION 1..297: note = Engineered IL-1R-I binding polypeptide
AEAKYAKETEAVQMEIFALPNLTRRQYTAFIRKLLDDPSQSSELLSEAKKLSESQAPKASGGGGSGGGGSDKTHTCPPCPAPELLGGPSVFLFPPKPKDTLMISRTPEVTCVVVDVSHEDPEVKFNWYVDGVEVHNAKTKPREEQYNSTYRVVSVLTVLHQDWLNGKEYKCKVSNKALPAPIEKTISKAKGQPREPQVYTLPPSRDELTKNQVSLTCLVKGFYPSDIAVEWESNGQPENNYKTTPPVLDSDGSFFLYSKLTVDKSRWQQGNVFSCSVMHEALHNHYTQKSLSLSPGK

SEQ ID NO: 1652 - protein, 297 aa, synthetic construct
  REGION 1..297: note = Engineered IL-1R-I binding polypeptide
AEAKYAKEIEEIQMEIFRLPNLTRRQYTAFIRKLLDDPSQSSELLSEAKKLSESQAPKASGGGGSGGGGSDKTHTCPPCPAPELLGGPSVFLFPPKPKDTLMISRTPEVTCVVVDVSHEDPEVKFNWYVDGVEVHNAKTKPREEQYNSTYRVVSVLTVLHQDWLNGKEYKCKVSNKALPAPIEKTISKAKGQPREPQVYTLPPSRDELTKNQVSLTCLVKGFYPSDIAVEWESNGQPENNYKTTPPVLDSDGSFFLYSKLTVDKSRWQQGNVFSCSVMHEALHNHYTQKSLSLSPGK

SEQ ID NO: 1653 - protein, 297 aa, synthetic construct
  REGION 1..297: note = Engineered IL-1R-I binding polypeptide
AEAKYAKELEAIQMEIFYLPNLTRRQYVAFIRKLLDDPSQSSELLSEAKKLSESQAPKASGGGGSGGGGSDKTHTCPPCPAPELLGGPSVFLFPPKPKDTLMISRTPEVTCVVVDVSHEDPEVKFNWYVDGVEVHNAKTKPREEQYNSTYRVVSVLTVLHQDWLNGKEYKCKVSNKALPAPIEKTISKAKGQPREPQVYTLPPSRDELTKNQVSLTCLVKGFYPSDIAVEWESNGQPENNYKTTPPVLDSDGSFFLYSKLTVDKSRWQQGNVFSCSVMHEALHNHYTQKSLSLSPGK

SEQ ID NO: 1654 - protein, 297 aa, synthetic construct
  REGION 1..297: note = Engineered IL-1R-I binding polypeptide
AEAKYAKELEEIQMEIFYLPNLTRRQYTAFIRKLLDDPSQSSELLSEAKKLSESQAPKASGGGGSGGGGSDKTHTCPPCPAPELLGGPSVFLFPPKPKDTLMISRTPEVTCVVVDVSHEDPEVKFNWYVDGVEVHNAKTKPREEQYNSTYRVVSVLTVLHQDWLNGKEYKCKVSNKALPAPIEKTISKAKGQPREPQVYTLPPSRDELTKNQVSLTCLVKGFYPSDIAVEWESNGQPENNYKTTPPVLDSDGSFFLYSKLTVDKSRWQQGNVFSCSVMHEALHNHYTQKSLSLSPGK

SEQ ID NO: 1655 - protein, 655 aa, synthetic construct
  REGION 1..655: note = Engineered IL-1R-I binding polypeptide
AEAKYAKEVEEIQMEIFRLPNLTRRQYTAFIRKLLDDPSQSSELLSEAKKLSESQAPKASGGGGSGGGGSDAHKSEVAHRFKDLGEENFKALVLIAFAQYLQQCPFEDHVKLVNEVTEFAKTCVADESAENCDKSLHTLFGDKLCTVATLRETYGEMADCCAKQEPERNECFLQHKDDNPNLPRLVRPEVDVMCTAFHDNEETFLKKYLYEIARRHPYFYAPELLFFAKRYKAAFTECCQAADKAACLLPKLDELRDEGKASSAKQRLKCASLQKFGERAFKAWAVARLSQRFPKAEFAEVSKLVTDLTKVHTECCHGDLLECADDRADLAKYICENQDSISSKLKECCEKPLLEKSHCIAEVENDEMPADLPSLAADFVESKDVCKNYAEAKDVFLGMFLYEYARRHPDYSVVLLLRLAKTYETTLEKCCAAADPHECYAKVFDEFKPLVEEPQNLIKQNCELFEQLGEYKFQNALLVRYTKKVPQVSTPTLVEVSRNLGKVGSKCCKHPEAKRMPCAEDYLSVVLNQLCVLHEKTPVSDRVTKCCTESLVNRRPCFSALEVDETYVPKEFNAETFTFHADICTLSEKERQIKKQTALVELVKHKPKATKEQLKAVMDDFAAFVEKCCKADDKETCFAEEGKKLVAASQAALGL

SEQ ID NO: 1656 - protein, 655 aa, synthetic construct
  REGION 1..655: note = Engineered IL-1R-I binding polypeptide
AEAKYAKEVEEIQMEIFRLPNLNRRQYTAFIRKLLDDPSQSSELLSEAKKLSESQAPKASGGGGSGGGGSDAHKSEVAHRFKDLGEENFKALVLIAFAQYLQQCPFEDHVKLVNEVTEFAKTCVADESAENCDKSLHTLFGDKLCTVATLRETYGEMADCCAKQEPERNECFLQHKDDNPNLPRLVRPEVDVMCTAFHDNEETFLKKYLYEIARRHPYFYAPELLFFAKRYKAAFTECCQAADKAACLLPKLDELRDEGKASSAKQRLKCASLQKFGERAFKAWAVARLSQRFPKAEFAEVSKLVTDLTKVHTECCHGDLLECADDRADLAKYICENQDSISSKLKECCEKPLLEKSHCIAEVENDEMPADLPSLAADFVESKDVCKNYAEAKDVFLGMFLYEYARRHPDYSVVLLLRLAKTYETTLEKCCAAADPHECYAKVFDEFKPLVEEPQNLIKQNCELFEQLGEYKFQNALLVRYTKKVPQVSTPTLVEVSRNLGKVGSKCCKHPEAKRMPCAEDYLSVVLNQLCVLHEKTPVSDRVTKCCTESLVNRRPCFSALEVDETYVPKEFNAETFTFHADICTLSEKERQIKKQTALVELVKHKPKATKEQLKAVMDDFAAFVEKCCKADDKETCFAEEGKKLVAASQAALGL

SEQ ID NO: 1657 - protein, 749 aa, synthetic construct
  REGION 1..749: note = Engineered IL-1R-I binding polypeptide
AEAKYAKEVEEIQMEIFRLPNLTRRQYTAFIRKLLDDPSQSSELLSEAKKLSESQAPKASGGGGSGGGGSVPDKTVRWCAVSEHEATKCQSFRDHMKSVIPSDGPSVACVKKASYLDCIRAIAANEADAVTLDAGLVYDAYLAPNNLKPVVAEFYGSKEDPQTFYYAVAVVKKDSGFQMNQLRGKKSCHTGLGRSAGWNIPIGLLYCDLPEPRKPLEKAVANFFSGSCAPCADGTDFPQLCQLCPGCGCSTLNQYFGYSGAFKCLKDGAGDVAFVKHSTIFENLANKADRDQYELLCLDNTRKPVDEYKDCHLAQVPSHTVVARSMGGKEDLIWELLNQAQEHFGKDKSKEFQLFSSPHGKDLLFKDSAHGFLKVPPRMDAKMYLGYEYVTAIRNLREGTCPEAPTDECKPVKWCALSHHERLKCDEWSVNSVGKIECVSAETTEDCIAKIMNGEADAMSLDGGFVYIAGKCGLVPVLAENYNKSDNCEDTPEAGYFAIAVVKKSASDLTWDNLKGKKSCHTAVGRTAGWNIPMGLLYNKINHCRFDEFFSEGCAPGSKKDSSLCKLCMGSGLNLCEPNNKEGYYGYTGAFRCLVEKGDVAFVKHQTVPQNTGGKNPDPWAKNLNEKDYELLCLDGTRKPVEEYANCHLARAPNHAVVTRKDKEACVHKILRQQQHLFGSNVTDCSGNFCLFRSETKDLLFRDDTVCLAKLHDRNTYEKYLGEEYVKAVGNLRKCSTSSLLEACTFRRP

SEQ ID NO: 1658 - protein, 86 aa, synthetic construct
  REGION 1..86: note = Engineered IL-1R-I binding polypeptide
AEAKYAKEVEEIQMEIFRLPNLTRRQYTAFIRKLLDDPSQSSELLSEAKKLSESQAPKASGGGGSGGGGSDKTHTCPPCPAPELLG

SEQ ID NO: 1659 - protein, 46 aa, synthetic construct
  REGION 1..46: note = Engineered albumin binding polypeptide
LAEAKVLANRELDKYGVSDFYKRLINKAKTVEGVEALKLHILAALP

SEQ ID NO: 1660 - protein, 46 aa, unidentified
  source 1..46: note = STREPTOCOCCUS SP. G148
LAEAKVLANRELDKYGVSDYYKNLINNAKTVEGVKALIDEILAALP

SEQ ID NO: 1661 - protein, 46 aa, synthetic construct
  REGION 1..46: note = Engineered albumin binding polypeptide
LAEAKEAANAELDSYGVSDFYKRLIDKAKTVEGVEALKDAILAALP

SEQ ID NO: 1662 - protein, 227 aa, Homo sapiens
DKTHTCPPCPAPELLGGPSVFLFPPKPKDTLMISRTPEVTCVVVDVSHEDPEVKFNWYVDGVEVHNAKTKPREEQYNSTYRVVSVLTVLHQDWLNGKEYKCKVSNKALPAPIEKTISKAKGQPREPQVYTLPPSRDELTKNQVSLTCLVKGFYPSDIAVEWESNGQPENNYKTTPPVLDSDGSFFLYSKLTVDKSRWQQGNVFSCSVMHEALHNHYTQKSLSLSPGK

SEQ ID NO: 1663 - protein, 585 aa, Homo sapiens [sequence omitted]

SEQ ID NO: 1664 - protein, 679 aa, Homo sapiens
VPDKTVRWCAVSEHEATKCQSFRDHMKSVIPSDGPSVACVKKASYLDCIRAIAANEADAVTLDAGLVYDAYLAPNNLKPVVAEFYGSKEDPQTFYYAVAVVKKDSGFQMNQLRGKKSCHTGLGRSAGWNIPIGLLYCDLPEPRKPLEKAVANFFSGSCAPCADGTDFPQLCQLCPGCGCSTLNQYFGYSGAFKCLKDGAGDVAFVKHSTIFENLANKADRDQYELLCLDNTRKPVDEYKDCHLAQVPSHTVVARSMGGKEDLIWELLNQAQEHFGKDKSKEFQLFSSPHGKDLLFKDSAHGFLKVPPRMDAKMYLGYEYVTAIRNLREGTCPEAPTDECKPVKWCALSHHERLKCDEWSVNSVGKIECVSAETTEDCIAKIMNGEADAMSLDGGFVYIAGKCGLVPVLAENYNKSDNCEDTPEAGYFAIAVVKKSASDLTWDNLKGKKSCHTAVGRTAGWNIPMGLLYNKINHCRFDEFFSEGCAPGSKKDSSLCKLCMGSGLNLCEPNNKEGYYGYTGAFRCLVEKGDVAFVKHQTVPQNTGGKNPDPWAKNLNEKDYELLCLDGTRKPVEEYANCHLARAPNHAVVTRKDKEACVHKILRQQQHLFGSNVTDCSGNFCLFRSETKDLLFRDDTVCLAKLHDRNTYEKYLGEEYVKAVGNLRKCSTSSLLEACTFRRP

SEQ ID NO: 1665 - protein, 330 aa, synthetic construct
  REGION 1..330: note = His-tagged target protein
EADKCNEREEKIILVSSANEIDVRPCPLNPNEYKGTITWYKNDSKTPVSTEQASRIHQHKKKLWFVPAKVEDSGHYYCVVRNSSYCLRIKITAKFVENEPNLCYNAEAIFKQRLPVAGDGGLVCPYMEFFKDENNELPKLLWYKDCKPLLLDNIHFSGVKDRLIVMNVAEKHRGNYTCHASYTYLGKQYPITRVIEFITLEENKPTRPVIVSPANETIEVDLGSQIQLICNVTGQLSDTAYWKWNGSFIDEDDPVLGEDYYSVENPANKRRSTLITVLNISETESRFYKHPFTCLARNTHGMDAAYVQLIYPVTGSENLYFQGSHHHHHH

SEQ ID NO: 1666 - protein, 552 aa, unidentified
  source 1..552: note = CYNOMOLGUS
LEADKCNEREEKIILVSSANEIDVRPCPLNPNEYKGTITWYKNDSKTPVSTEQASRIHQHKKKLWFVPAKVEDSGHYYCVVRNSSYCLRIKITAKFVENEPNLCYNAEAIFKQRLPVAGDGGLVCPYMEFFKDENNELPKLLWYKDCKPLLLDNIHFSGVKDRLIVMNVAEKHRGNYTCHASYTYLGKQYPITRVIEFITLEENKPTRPVIVSPANETIEVDLGSQIQLICNVTGQLSDTAYWKWNGSFIDEDDPVLGEDYYSVENPANKRRSTLITVLNISETESRFYKHPFTCLARNTHGMDAAYVQLIYPVTGSENLYFQGSDKTHTCPPCPAPELLGGPSVFLFPPKPKDTLMISRTPEVTCVVVDVSHEDPEVKFNWYVDGVEVHNAKTKPREEQYNSTYRVVSVLTVLHQDWLNGKEYKCKVSNKALPAPIEKTISKAKGQPREPQVYTLPPSRDELTKNQVSLTCLVKGFYPSDIAVEWESNGQPENNYKTTPPVLDSDGSFFLYSKLTVDKSRWQQGNVFSCSVMHEALHNHYTQKSLSLSPGK

SEQ ID NO: 1667 - protein, 58 aa, synthetic construct
  REGION 1..58: note = Engineered IL-1R-I binding polypeptide
AEAKYAKEAHRAQMEIFALPNLTRRQYTAFIRKLLDDPSQSSELLSEAKKLSESQAPK

SEQ ID NO: 1668 - protein, 58 aa, synthetic construct
  REGION 1..58: note = Engineered IL-1R-I binding polypeptide
AEAKYAKEALSAQQEIFALPNLTRRQYTAFIRKLLDDPSQSSELLSEAKKLSESQAPK

SEQ ID NO: 1669 - protein, 55 aa, synthetic construct
  REGION 1..55: note = Engineered IL-1R-I binding polypeptide
KYAKEAHRAQMEIFALPNLTRRQYTAFIRKLLDDPSQSSELLSEAKKLSESQAPK

SEQ ID NO: 1670 - protein, 58 aa, synthetic construct
  REGION 1..58: note = Engineered IL-1R-I binding polypeptide
AEAKYAKEIEEVQMEIFYLPNLTRRQYTAFIRKLLDDPSQSSELLSEAKKLSESQAPK

SEQ ID NO: 1671 - protein, 58 aa, synthetic construct
  REGION 1..58: note = Engineered IL-1R-I binding polypeptide
AEAKYAKEIEEIQMEIFHLPNLTRRQYTAFIRKLLDDPSQSSELLSEAKKLSESQAPK

SEQ ID NO: 1672 - protein, 58 aa, synthetic construct
  REGION 1..58: note = Engineered IL-1R-I binding polypeptide
AEAKYAKEVEEIQMEIFRLPNLTRRQYTAFIRKLLDDPSQSSELLSEAKKLSESQAPK

SEQ ID NO: 1673 - protein, 58 aa, synthetic construct
  REGION 1..58: note = Engineered IL-1R-I binding polypeptide
AEAKYAKEVEDIQLEIFALPNLTRRQYTAFIRKLLDDPSQSSELLSEAKKLSESQAPK

SEQ ID NO: 1674 - protein, 58 aa, synthetic construct
  REGION 1..58: note = Engineered IL-1R-I binding polypeptide
AEAKYAKELEAIQMEIFHLPNLTRRQYTAFIRKLLDDPSQSSELLSEAKKLSESQAPK

SEQ ID NO: 1675 - protein, 58 aa, synthetic construct
  REGION 1..58: note = Engineered IL-1R-I binding polypeptide
AEAKYAKETEAVQMEIFALPNLTRRQYTAFIRKLLDDPSQSSELLSEAKKLSESQAPK

SEQ ID NO: 1676 - protein, 58 aa, synthetic construct
  REGION 1..58: note = Engineered IL-1R-I binding polypeptide
AEAKYAKEIEEIQMEIFRLPNLTRRQYTAFIRKLLDDPSQSSELLSEAKKLSESQAPK

SEQ ID NO: 1677 - protein, 58 aa, synthetic construct
  REGION 1..58: note = Engineered IL-1R-I binding polypeptide
AEAKYAKELEAIQMEIFYLPNLTRRQYVAFIRKLLDDPSQSSELLSEAKKLSESQAPK

SEQ ID NO: 1678 - protein, 58 aa, synthetic construct
  REGION 1..58: note = Engineered IL-1R-I binding polypeptide
AEAKYAKELEEIQMEIFYLPNLTRRQYTAFIRKLLDDPSQSSELLSEAKKLSESQAPK

SEQ ID NO: 1679 - protein, 58 aa, synthetic construct
  REGION 1..58: note = Engineered IL-1R-I binding polypeptide
AEAKYAKEVEEIQMEIFRLPNLNRRQYTAFIRKLLDDPSQSSELLSEAKKLSESQAPK

SEQ ID NO: 1680 - DNA, 147 bp, synthetic construct
  misc_feature 1..147: note = Engineered library oligonucleotide
  misc_difference 39..47: note = n is a, c, g, or t
  misc_difference 51..56: note = n is a, c, g, or t
  misc_difference 63..68: note = n is a, c, g, or t
  misc_difference 84..89: note = n is a, c, g, or t
  misc_difference 93..98: note = n is a, c, g, or t
  misc_difference 108..110: note = n is a, c, g, or t
  misc_difference 117..119: note = n is a, c, g, or t
  source 1..147: mol_type = other DNA
aaataaatctcgaggtagatgccaaatacgccaaagaannnnnnnnngcgnnnnnngagatcnnnnnnctgcctaacctcaccnnnnnncaannnnnngccttcatcnnnaaattannngatgacccaagccagagctcattattta

SEQ ID NO: 1681 - DNA, 147 bp, synthetic construct
  misc_feature 1..147: note = Engineered library oligonucleotide
  misc_difference 39..56: note = n is a, c, g, or t
  misc_difference 63..68: note = n is a, c, g, or t
  misc_difference 84..89: note = n is a, c, g, or t
  misc_difference 93..98: note = n is a, c, g, or t
  misc_difference 108..110: note = n is a, c, g, or t
  misc_difference 117..119: note = n is a, c, g, or t
  source 1..147: mol_type = other DNA
aaataaatctcgaggtagatgccaaatacgccaaagaannnnnnnnnnnnnnnnnngagatcnnnnnnctgcctaacctcaccnnnnnncaannnnnngccttcatcnnnaaattannngatgacccaagccagagctcattattta

SEQ ID NO: 1682 - DNA, 147 bp, synthetic construct; identical to SEQ ID NO: 1681
  misc_feature 1..147: note = Engineered library oligonucleotide
  misc_difference 39..56: note = n is a, c, g, or t
  misc_difference 63..68: note = n is a, c, g, or t
  misc_difference 84..89: note = n is a, c, g, or t
  misc_difference 93..98: note = n is a, c, g, or t
  misc_difference 108..110: note = n is a, c, g, or t
  misc_difference 117..119: note = n is a, c, g, or t
  source 1..147: mol_type = other DNA

SEQ ID NO: 1683 - protein, 10 aa, synthetic construct
  REGION 1..10: note = Linker
GGGGSGGGGS

SEQ ID NO: 1684 - protein, 12 aa, synthetic construct
  REGION 1..12: note = Linker
ASGGGGSGGGGS

SEQ ID NO: 1685 - protein, 40 aa, synthetic construct
  REGION 1..40: note = Linker
KEAAAKEAAAKEAAAKELAAKEAAAKEAAAKEAAAKELAA

SEQ ID NO: 1686 - protein, 59 aa, synthetic construct
  REGION 1..59: note = Engineered IL-1R-I binding polypeptide
  VARIANT 2..7: note = X can be any naturally occurring amino acid
  VARIANT 10..11: note = X can be any naturally occurring amino acid
  VARIANT 16: note = X can be any naturally occurring amino acid
  VARIANT 18: note = X can be any naturally occurring amino acid
  VARIANT 21: note = X can be any naturally occurring amino acid
  VARIANT 25..26: note = X can be any naturally occurring amino acid
  VARIANT 28: note = X can be any naturally occurring amino acid
GLUXXXXXXGLUILEXXLEUPROASNLEUXARGXGLNTYRXALAPHEILEXXLEUXASP

SEQ ID NO: 1687 - protein, 107 aa, synthetic construct
  REGION 1..107: note = Engineered IL-1R-I binding polypeptide
  VARIANT 3..8: note = X can be any naturally occurring amino acid
  VARIANT 11..12: note = X can be any naturally occurring amino acid
  VARIANT 17: note = X can be any naturally occurring amino acid
  VARIANT 19: note = X can be any naturally occurring amino acid
  VARIANT 22: note = X can be any naturally occurring amino acid
  VARIANT 26..27: note = X can be any naturally occurring amino acid
  VARIANT 29: note = X can be any naturally occurring amino acid
  VARIANT 36..37: note = X can be any naturally occurring amino acid
  VARIANT 40: note = X can be any naturally occurring amino acid
  VARIANT 46..48: note = X can be any naturally occurring amino acid
LYSGLUXXXXXXGLUILEXXLEUPROASNLEUXARGXGLNTYRXALAPHEILEXXLEUXASPASPPROSERGLNSERXXLEULEUXGLUALALYSLYSLEUXXXGLN

SEQ ID NO: 1688 - protein, 119 aa, synthetic construct
  REGION 1..119: note = Engineered IL-1R-I binding polypeptide
  VARIANT 5..10: note = X can be any naturally occurring amino acid
  VARIANT 13..14: note = X can be any naturally occurring amino acid
  VARIANT 19: note = X can be any naturally occurring amino acid
  VARIANT 21: note = X can be any naturally occurring amino acid
  VARIANT 24: note = X can be any naturally occurring amino acid
  VARIANT 28..29: note = X can be any naturally occurring amino acid
  VARIANT 31: note = X can be any naturally occurring amino acid
  VARIANT 38..39: note = X can be any naturally occurring amino acid
  VARIANT 42: note = X can be any naturally occurring amino acid
  VARIANT 48..50: note = X can be any naturally occurring amino acid
TYRALALYSGLUXXXXXXGLUILEXXLEUPROASNLEUXARGXGLNTYRXALAPHEILEXXLEUXASPASPPROSERGLNSERXXLEULEUXGLUALALYSLYSLEUXXXGLNALAPRO

SEQ ID NO: 1689 - protein, 119 aa, synthetic construct
  REGION 1..119: note = Engineered IL-1R-I binding polypeptide
  VARIANT 5..10: note = X can be any naturally occurring amino acid
  VARIANT 13..14: note = X can be any naturally occurring amino acid
  VARIANT 19: note = X can be any naturally occurring amino acid
  VARIANT 21: note = X can be any naturally occurring amino acid
  VARIANT 24: note = X can be any naturally occurring amino acid
  VARIANT 28..29: note = X can be any naturally occurring amino acid
  VARIANT 31: note = X can be any naturally occurring amino acid
  VARIANT 38..39: note = X can be any naturally occurring amino acid
  VARIANT 42: note = X can be any naturally occurring amino acid
  VARIANT 48..50: note = X can be any naturally occurring amino acid
PHEASNLYSGLUXXXXXXGLUILEXXLEUPROASNLEUXARGXGLNTYRXALAPHEILEXXLEUXASPASPPROSERGLNSERXXLEULEUXGLUALALYSLYSLEUXXXGLNALAPRO

SEQ ID NO: 1690 - protein, 129 aa, synthetic construct
  REGION 1..129: note = Engineered IL-1R-I binding polypeptide
  VARIANT 5..10: note = X can be any naturally occurring amino acid
  VARIANT 13..14: note = X can be any naturally occurring amino acid
  VARIANT 19: note = X can be any naturally occurring amino acid
  VARIANT 21: note = X can be any naturally occurring amino acid
  VARIANT 24: note = X can be any naturally occurring amino acid
  VARIANT 28..29: note = X can be any naturally occurring amino acid
  VARIANT 31: note = X can be any naturally occurring amino acid
  VARIANT 42: note = X can be any naturally occurring amino acid
PHEASNLYSGLUXXXXXXGLUILEXXLEUPROASNLEUXARGXGLNTYRXALAPHEILEXXLEUXASPASPPROSERGLNSERALAASNLEULEUXGLUALALYSLYSLEUASNASPALAGLNALAPRO

SEQ ID NO: 1691 - protein, 129 aa, synthetic construct
  REGION 1..129: note = Engineered IL-1R-I binding polypeptide
  VARIANT 5..10: note = X can be any naturally occurring amino acid
  VARIANT 13..14: note = X can be any naturally occurring amino acid
  VARIANT 19: note = X can be any naturally occurring amino acid
  VARIANT 21: note = X can be any naturally occurring amino acid
  VARIANT 24: note = X can be any naturally occurring amino acid
  VARIANT 28..29: note = X can be any naturally occurring amino acid
  VARIANT 31: note = X can be any naturally occurring amino acid
  VARIANT 42: note = X can be any naturally occurring amino acid
PHEALALYSGLUXXXXXXGLUILEXXLEUPROASNLEUXARGXGLNTYRXALAPHEILEXXLEUXASPASPPROSERGLNSERSERGLULEULEUXGLUALALYSLYSLEUSERGLUSERGLNALAPRO

SEQ ID NO: 1692 - protein, 129 aa, synthetic construct
  REGION 1..129: note = Engineered IL-1R-I binding polypeptide
  VARIANT 5..10: note = X can be any naturally occurring amino acid
  VARIANT 13..14: note = X can be any naturally occurring amino acid
  VARIANT 19: note = X can be any naturally occurring amino acid
  VARIANT 21: note = X can be any naturally occurring amino acid
  VARIANT 24: note = X can be any naturally occurring amino acid
  VARIANT 28..29: note = X can be any naturally occurring amino acid
  VARIANT 31: note = X can be any naturally occurring amino acid
  VARIANT 42: note = X can be any naturally occurring amino acid
PHEALALYSGLUXXXXXXGLUILEXXLEUPROASNLEUXARGXGLNTYRXALAPHEILEXXLEUXASPASPPROSERGLNSERSERGLULEULEUXGLUALALYSLYSLEUASNASPSERGLNALAPRO

SEQ ID NO: 1693 - protein, 125 aa, synthetic construct
  REGION 1..125: note = Engineered IL-1R-I binding polypeptide
  VARIANT 5..10: note = X can be any naturally occurring amino acid
  VARIANT 13..14: note = X can be any naturally occurring amino acid
  VARIANT 19: note = X can be any naturally occurring amino acid
  VARIANT 21: note = X can be any naturally occurring amino acid
  VARIANT 24: note = X can be any naturally occurring amino acid
  VARIANT 28..29: note = X can be any naturally occurring amino acid
  VARIANT 31: note = X can be any naturally occurring amino acid
  VARIANT 42: note = X can be any naturally occurring amino acid
  VARIANT 48..49: note = X can be any naturally occurring amino acid
TYRALALYSGLUXXXXXXGLUILEXXLEUPROASNLEUXARGXGLNTYRXALAPHEILEXXLEUXASPASPPROSERGLNSERSERGLULEULEUXGLUALALYSLYSLEUXXSERGLNALAPRO

SEQ ID NO: 1694 - protein, 128 aa, synthetic construct
  REGION 1..128: note = Engineered IL-1R-I binding polypeptide
  VARIANT 6..11: note = X can be any naturally occurring amino acid
  VARIANT 14..15: note = X can be any naturally occurring amino acid
  VARIANT 20: note = X can be any naturally occurring amino acid
  VARIANT 22: note = X can be any naturally occurring amino acid
  VARIANT 25: note = X can be any naturally occurring amino acid
  VARIANT 29..30: note = X can be any naturally occurring amino acid
  VARIANT 32: note = X can be any naturally occurring amino acid
  VARIANT 43: note = X can be any naturally occurring amino acid
  VARIANT 49..50: note = X can be any naturally occurring amino acid
LYSTYRALALYSGLUXXXXXXGLUILEXXLEUPROASNLEUXARGXGLNTYRXALAPHEILEXXLEUXASPASPPROSERGLNSERSERGLULEULEUXGLUALALYSLYSLEUXXSERGLNALAPRO

SEQ ID NO: 1695 - protein, 146 aa, synthetic construct
  REGION 1..146: note = Engineered IL-1R-I binding protein
  VARIANT 9..14: note = X can be any naturally occurring amino acid
  VARIANT 17..18: note = X can be any naturally occurring amino acid
  VARIANT 23: note = X can be any naturally occurring amino acid
  VARIANT 25: note = X can be any naturally occurring amino acid
  VARIANT 28: note = X can be any naturally occurring amino acid
  VARIANT 32..33: note = X can be any naturally occurring amino acid
  VARIANT 35: note = X can be any naturally occurring amino acid
ALAASPASNASNPHEASNLYSGLUXXXXXXGLUILEXXLEUPROASNLEUXARGXGLNTYRXALAPHEILEXXLEUXASPASPPROSERGLNSERALAASNLEULEUSERGLUALALYSLYSLEUASNGLUSERGLNALAPROLYS

SEQ ID NO: 1696 - protein, 146 aa, synthetic construct
  REGION 1..146: note = Engineered IL-1R-I binding polypeptide
  VARIANT 9..14: note = X can be any naturally occurring amino acid
  VARIANT 17..18: note = X can be any naturally occurring amino acid
  VARIANT 23: note = X can be any naturally occurring amino acid
  VARIANT 25: note = X can be any naturally occurring amino acid
  VARIANT 28: note = X can be any naturally occurring amino acid
  VARIANT 32..33: note = X can be any naturally occurring amino acid
  VARIANT 35: note = X can be any naturally occurring amino acid
ALAASPASNLYSPHEASNLYSGLUXXXXXXGLUILEXXLEUPROASNLEUXARGXGLNTYRXALAPHEILEXXLEUXASPASPPROSERGLNSERALAASNLEULEUALAGLUALALYSLYSLEUASNASPALAGLNALAPROLYS

SEQ ID NO: 1697 - protein, 146 aa, synthetic construct
  REGION 1..146: note = Engineered IL-1R-I binding polypeptide
  VARIANT 9..14: note = X can be any naturally occurring amino acid
  VARIANT 17..18: note = X can be any naturally occurring amino acid
  VARIANT 23: note = X can be any naturally occurring amino acid
  VARIANT 25: note = X can be any naturally occurring amino acid
  VARIANT 28: note = X can be any naturally occurring amino acid
  VARIANT 32..33: note = X can be any naturally occurring amino acid
  VARIANT 35: note = X can be any naturally occurring amino acid
ALAASPASNLYSPHEASNLYSGLUXXXXXXGLUILEXXLEUPROASNLEUXARGXGLNTYRXALAPHEILEXXLEUXASPASPPROSERVALSERLYSGLUILELEUALAGLUALALYSLYSLEUASNASPALAGLNALAPROLYS

SEQ ID NO: 1698 - protein, 155 aa, synthetic construct
  REGION 1..155: note = Engineered IL-1R-I binding polypeptide
  VARIANT 12..17: note = X can be any naturally occurring amino acid
  VARIANT 20..21: note = X can be any naturally occurring amino acid
  VARIANT 26: note = X can be any naturally occurring amino acid
  VARIANT 28: note = X can be any naturally occurring amino acid
  VARIANT 31: note = X can be any naturally occurring amino acid
  VARIANT 35..36: note = X can be any naturally occurring amino acid
  VARIANT 38: note = X can be any naturally occurring amino acid
ALAASPALAGLNGLNASNASNPHEASNLYSGLUXXXXXXGLUILEXXLEUPROASNLEUXARGXGLNTYRXALAPHEILEXXLEUXASPASPPROSERGLNSERTHRASNVALLEUGLYGLUALALYSLYSLEUASNGLUSERGLNALAPROLYS

SEQ ID NO: 1699 - protein, 140 aa, synthetic construct
  REGION 1..140: note = Engineered IL-1R-I binding polypeptide
  VARIANT 7..12: note = X can be any naturally occurring amino acid
  VARIANT 15..16: note = X can be any naturally occurring amino acid
  VARIANT 21: note = X can be any naturally occurring amino acid
  VARIANT 23: note = X can be any naturally occurring amino acid
  VARIANT 26: note = X can be any naturally occurring amino acid
  VARIANT 30..31: note = X can be any naturally occurring amino acid
  VARIANT 33: note = X can be any naturally occurring amino acid
ALAGLNHISASPGLUGLUXXXXXXGLUILEXXLEUPROASNLEUXARGXGLNTYRXALAPHEILEXXLEUXASPASPPROSERGLNSERALAASNVALLEUGLYGLUALAGLNLYSLEUASNASPSERGLNALAPROLYS

SEQ ID NO: 1700 - protein, 146 aa, synthetic construct
  REGION 1..146: note = Engineered IL-1R-I binding polypeptide
  VARIANT 9..14: note = X can be any naturally occurring amino acid
  VARIANT 17..18: note = X can be any naturally occurring amino acid
  VARIANT 23: note = X can be any naturally occurring amino acid
  VARIANT 25: note = X can be any naturally occurring amino acid
  VARIANT 28: note = X can be any naturally occurring amino acid
  VARIANT 32..33: note = X can be any naturally occurring amino acid
  VARIANT 35: note = X can be any naturally occurring amino acid
VALASPASNLYSPHEASNLYSGLUXXXXXXGLUILEXXLEUPROASNLEUXARGXGLNTYRXALAPHEILEXXLEUXASPASPPROSERGLNSERALAASNLEULEUALAGLUALALYSLYSLEUASNASPALAGLNALAPROLYS

SEQ ID NO: 1701 - protein, 146 aa, synthetic construct
  REGION 1..146: note = Engineered IL-1R-I binding polypeptide
  VARIANT 9..14: note = X can be any naturally occurring amino acid
  VARIANT 17..18: note = X can be any naturally occurring amino acid
  VARIANT 23: note = X can be any naturally occurring amino acid
  VARIANT 25: note = X can be any naturally occurring amino acid
  VARIANT 28: note = X can be any naturally occurring amino acid
  VARIANT 32..33: note = X can be any naturally occurring amino acid
  VARIANT 35: note = X can be any naturally occurring amino acid
ALAGLUALALYSTYRALALYSGLUXXXXXXGLUILEXXLEUPROASNLEUXARGXGLNTYRXALAPHEILEXXLEUXASPASPPROSERGLUSERSERGLULEULEUSERGLUALALYSLYSLEUASNLYSSERGLNALAPROLYS

SEQ ID NO: 1702 - protein, 146 aa, synthetic construct
  REGION 1..146: note = Engineered IL-1R-I binding polypeptide
  VARIANT 9..14: note = X can be any naturally occurring amino acid
  VARIANT 17..18: note = X can be any naturally occurring amino acid
  VARIANT 23: note = X can be any naturally occurring amino acid
  VARIANT 25: note = X can be any naturally occurring amino acid
  VARIANT 28: note = X can be any naturally occurring amino acid
  VARIANT 32..33: note = X can be any naturally occurring amino acid
  VARIANT 35: note = X can be any naturally occurring amino acid
VALASPALALYSTYRALALYSGLUXXXXXXGLUILEXXLEUPROASNLEUXARGXGLNTYRXALAPHEILEXXLEUXASPASPPROSERGLNSERSERGLULEULEUALAGLUALALYSLYSLEUASNASPALAGLNALAPROLYS

SEQ ID NO: 1703 - protein, 146 aa, synthetic construct
  REGION 1..146: note = Engineered IL-1R-I binding polypeptide
  VARIANT 9..14: note = X can be any naturally occurring amino acid
  VARIANT 17..18: note = X can be any naturally occurring amino acid
  VARIANT 23: note = X can be any naturally occurring amino acid
  VARIANT 25: note = X can be any naturally occurring amino acid
  VARIANT 28: note = X can be any naturally occurring amino acid
  VARIANT 32..33: note = X can be any naturally occurring amino acid
  VARIANT 35: note = X can be any naturally occurring amino acid
VALASPALALYSTYRALALYSGLUXXXXXXGLUILEXXLEUPROASNLEUXARGXGLNTYRXALAPHEILEXXLEUXASPASPPROSERGLNSERSERGLULEULEUALAGLUALALYSLYSLEUASNASPSERGLNALAPROLYS

SEQ ID NO: 1704 - protein, 146 aa, synthetic construct
  REGION 1..146: note = Engineered IL-1R-I binding polypeptide
  VARIANT 9..14: note = X can be any naturally occurring amino acid
  VARIANT 17..18: note = X can be any naturally occurring amino acid
  VARIANT 23: note = X can be any naturally occurring amino acid
  VARIANT 25: note = X can be any naturally occurring amino acid
  VARIANT 28: note = X can be any naturally occurring amino acid
  VARIANT 32..33: note = X can be any naturally occurring amino acid
  VARIANT 35: note = X can be any naturally occurring amino acid
ALAGLUALALYSTYRALALYSGLUXXXXXXGLUILEXXLEUPROASNLEUXARGXGLNTYRXALAPHEILEXXLEUXASPASPPROSERGLNSERSERGLULEULEUSERGLUALALYSLYSLEUASNASPSERGLNALAPROLYS

SEQ ID NO: 1705 - protein, 143 aa, synthetic construct
  REGION 1..143: note = Engineered IL-1R-I binding polypeptide
  VARIANT 9..14: note = X can be any naturally occurring amino acid
  VARIANT 17..18: note = X can be any naturally occurring amino acid
  VARIANT 23: note = X can be any naturally occurring amino acid
  VARIANT 25: note = X can be any naturally occurring amino acid
  VARIANT 28: note = X can be any naturally occurring amino acid
  VARIANT 32..33: note = X can be any naturally occurring amino acid
  VARIANT 35: note = X can be any naturally occurring amino acid
ALAGLUALALYSTYRALALYSGLUXXXXXXGLUILEXXLEUPROASNLEUXARGXGLNTYRXALAPHEILEXXLEUXASPASPPROSERGLNSERSERGLULEULEUSERGLUALALYSLYSLEUASNASPSERGLNALAPRO

SEQ ID NO: 1706 - protein, 146 aa, synthetic construct
  REGION 1..146: note = Engineered IL-1R-I binding polypeptide
  VARIANT 9..14: note = X can be any naturally occurring amino acid
  VARIANT 17..18: note = X can be any naturally occurring amino acid
  VARIANT 23: note = X can be any naturally occurring amino acid
  VARIANT 25: note = X can be any naturally occurring amino acid
  VARIANT 28: note = X can be any naturally occurring amino acid
  VARIANT 32..33: note = X can be any naturally occurring amino acid
  VARIANT 35: note = X can be any naturally occurring amino acid
ALAGLUALALYSPHEALALYSGLUXXXXXXGLUILEXXLEUPROASNLEUXARGXGLNTYRXALAPHEILEXXLEUXASPASPPROSERGLNSERSERGLULEULEUSERGLUALALYSLYSLEUASNASPSERGLNALAPROLYS

SEQ ID NO: 1707 - protein, 143 aa, synthetic construct
  REGION 1..143: note = Engineered IL-1R-I binding polypeptide
  VARIANT 9..14: note = X can be any naturally occurring amino acid
  VARIANT 17..18: note = X can be any naturally occurring amino acid
  VARIANT 23: note = X can be any naturally occurring amino acid
  VARIANT 25: note = X can be any naturally occurring amino acid
  VARIANT 28: note = X can be any naturally occurring amino acid
  VARIANT 32..33: note = X can be any naturally occurring amino acid
  VARIANT 35: note = X can be any naturally occurring amino acid
ALAGLUALALYSPHEALALYSGLUXXXXXXGLUILEXXLEUPROASNLEUXARGXGLNTYRXALAPHEILEXXLEUXASPASPPROSERGLNSERSERGLULEULEUSERGLUALALYSLYSLEUASNASPSERGLNALAPRO

SEQ ID NO: 1708 - protein, 146 aa, synthetic construct
  REGION 1..146: note = Engineered IL-1R-I binding polypeptide
  VARIANT 9..14: note = X can be any naturally occurring amino acid
  VARIANT 17..18: note = X can be any naturally occurring amino acid
  VARIANT 23: note = X can be any naturally occurring amino acid
  VARIANT 25: note = X can be any naturally occurring amino acid
  VARIANT 28: note = X can be any naturally occurring amino acid
  VARIANT 32..33: note = X can be any naturally occurring amino acid
  VARIANT 35: note = X can be any naturally occurring amino acid
ALAGLUALALYSTYRALALYSGLUXXXXXXGLUILEXXLEUPROASNLEUXARGXGLNTYRXALAPHEILEXXLEUXASPASPPROSERGLNSERSERGLULEULEUALAGLUALALYSLYSLEUASNASPALAGLNALAPROLYS

SEQ ID NO: 1709 - protein, 146 aa, synthetic construct
  REGION 1..146: note = Engineered IL-1R-I binding polypeptide
  VARIANT 9..14: note = X can be any naturally occurring amino acid
  VARIANT 17..18: note = X can be any naturally occurring amino acid
  VARIANT 23: note = X can be any naturally occurring amino acid
  VARIANT 25: note = X can be any naturally occurring amino acid
  VARIANT 28: note = X can be any naturally occurring amino acid
  VARIANT 32..33: note = X can be any naturally occurring amino acid
  VARIANT 35: note = X can be any naturally occurring amino acid
ALAGLUALALYSTYRALALYSGLUXXXXXXGLUILEXXLEUPROASNLEUXARGXGLNTYRXALAPHEILEXXLEUXASPASPPROSERGLNSERSERGLULEULEUSERGLUALALYSLYSLEUSERGLUSERGLNALAPROLYS

SEQ ID NO: 1710 - protein, 143 aa, synthetic construct
  REGION 1..143: note = Engineered IL-1R-I binding polypeptide
  VARIANT 9..14: note = X can be any naturally occurring amino acid
  VARIANT 17..18: note = X can be any naturally occurring amino acid
  VARIANT 23: note = X can be any naturally occurring amino acid
  VARIANT 25: note = X can be any naturally occurring amino acid
  VARIANT 28: note = X can be any naturally occurring amino acid
  VARIANT 32..33: note = X can be any naturally occurring amino acid
  VARIANT 35: note = X can be any naturally occurring amino acid
ALAGLUALALYSTYRALALYSGLUXXXXXXGLUILEXXLEUPROASNLEUXARGXGLNTYRXALAPHEILEXXLEUXASPASPPROSERGLNSERSERGLULEULEUSERGLUALALYSLYSLEUSERGLUSERGLNALAPRO

SEQ ID NO: 1711 - protein, 146 aa, synthetic construct
  REGION 1..146: note = Engineered IL-1R-I binding polypeptide
  VARIANT 9..14: note = X can be any naturally occurring amino acid
  VARIANT 17..18: note = X can be any naturally occurring amino acid
  VARIANT 23: note = X can be any naturally occurring amino acid
  VARIANT 25: note = X can be any naturally occurring amino acid
  VARIANT 28: note = X can be any naturally occurring amino acid
  VARIANT 32..33: note = X can be any naturally occurring amino acid
  VARIANT 35: note = X can be any naturally occurring amino acid
ALAGLUALALYSPHEALALYSGLUXXXXXXGLUILEXXLEUPROASNLEUXARGXGLNTYRXALAPHEILEXXLEUXASPASPPROSERGLNSERSERGLULEULEUSERGLUALALYSLYSLEUSERGLUSERGLNALAPROLYS

SEQ ID NO: 1712 - protein, 143 aa, synthetic construct
  REGION 1..143: note = Engineered IL-1R-I binding polypeptide
  VARIANT 9..14: note = X can be any naturally occurring amino acid
  VARIANT 17..18: note = X can be any naturally occurring amino acid
  VARIANT 23: note = X can be any naturally occurring amino acid
  VARIANT 25: note = X can be any naturally occurring amino acid
  VARIANT 28: note = X can be any naturally occurring amino acid
  VARIANT 32..33: note = X can be any naturally occurring amino acid
  VARIANT 35: note = X can be any naturally occurring amino acid
ALAGLUALALYSPHEALALYSGLUXXXXXXGLUILEXXLEUPROASNLEUXARGXGLNTYRXALAPHEILEXXLEUXASPASPPROSERGLNSERSERGLULEULEUSERGLUALALYSLYSLEUSERGLUSERGLNALAPRO

SEQ ID NO: 1713 - protein, 146 aa, synthetic construct
  REGION 1..146: note = Engineered IL-1R-I binding polypeptide
  VARIANT 9..14: note = X can be any naturally occurring amino acid
  VARIANT 17..18: note = X can be any naturally occurring amino acid
  VARIANT 23: note = X can be any naturally occurring amino acid
  VARIANT 25: note = X can be any naturally occurring amino acid
  VARIANT 28: note = X can be any naturally occurring amino acid
  VARIANT 32..33: note = X can be any naturally occurring amino acid
  VARIANT 35: note = X can be any naturally occurring amino acid
ALAGLUALALYSTYRALALYSGLUXXXXXXGLUILEXXLEUPROASNLEUXARGXGLNTYRXALAPHEILEXXLEUXASPASPPROSERGLNSERSERGLULEULEUALAGLUALALYSLYSLEUSERGLUALAGLNALAPROLYS

SEQ ID NO: 1714 - protein, 146 aa, synthetic construct
  REGION 1..146: note = Engineered IL-1R-I binding polypeptide
  VARIANT 9..14: note = X can be any naturally occurring amino acid
  VARIANT 17..18: note = X can be any naturally occurring amino acid
  VARIANT 23: note = X can be any naturally occurring amino acid
  VARIANT 25: note = X can be any naturally occurring amino acid
  VARIANT 28: note = X can be any naturally occurring amino acid
  VARIANT 32..33: note = X can be any naturally occurring amino acid
  VARIANT 35: note = X can be any naturally occurring amino acid
ALAGLUALALYSTYRALALYSGLUXXXXXXGLUILEXXLEUPROASNLEUXARGXGLNTYRXALAPHEILEXXLEUXASPASPPROSERGLNSERSERGLULEULEUSERGLUALALYSLYSLEUGLUSERSERGLNALAPROLYS

SEQ ID NO: 1715 - protein, 143 aa, synthetic construct
  REGION 1..143: note = Engineered IL-1R-I binding polypeptide
  VARIANT 9..14: note = X can be any naturally occurring amino acid
  VARIANT 17..18: note = X can be any naturally occurring amino acid
  VARIANT 23: note = X can be any naturally occurring amino acid
  VARIANT 25: note = X can be any naturally occurring amino acid
  VARIANT 28: note = X can be any naturally occurring amino acid
  VARIANT 32..33: note = X can be any naturally occurring amino acid
  VARIANT 35: note = X can be any naturally occurring amino acid
ALAGLUALALYSTYRALALYSGLUXXXXXXGLUILEXXLEUPROASNLEUXARGXGLNTYRXALAPHEILEXXLEUXASPASPPROSERGLNSERSERGLULEULEUSERGLUALALYSLYSLEUGLUSERSERGLNALAPRO

SEQ ID NO: 1716 - protein, 146 aa, synthetic construct
  REGION 1..146: note = Engineered IL-1R-I binding polypeptide
  VARIANT 9..14: note = X can be any naturally occurring amino acid
  VARIANT 17..18: note = X can be any naturally occurring amino acid
  VARIANT 23: note = X can be any naturally occurring amino acid
  VARIANT 25: note = X can be any naturally occurring amino acid
  VARIANT 28: note = X can be any naturally occurring amino acid
  VARIANT 32..33: note = X can be any naturally occurring amino acid
  VARIANT 35: note = X can be any naturally occurring amino acid
ALAGLUALALYSTYRALALYSGLUXXXXXXGLUILEXXLEUPROASNLEUXARGXGLNTYRXALAPHEILEXXLEUXASPASPPROSERGLNSERSERGLULEULEUALAGLUALALYSLYSLEUGLUSERALAGLNALAPROLYS

SEQ ID NO: 1717 - protein, 146 aa, synthetic construct
  REGION 1..146: note = Engineered IL-1R-I binding polypeptide
  VARIANT 9..14: note = X can be any naturally occurring amino acid
  VARIANT 17..18: note = X can be any naturally occurring amino acid
  VARIANT 23: note = X can be any naturally occurring amino acid
  VARIANT 25: note = X can be any naturally occurring amino acid
  VARIANT 28: note = X can be any naturally occurring amino acid
  VARIANT 32..33: note = X can be any naturally occurring amino acid
  VARIANT 35: note = X can be any naturally occurring amino acid
ALAGLUALALYSTYRALALYSGLUXXXXXXGLUILEXXLEUPROASNLEUXARGXGLNTYRXALAPHEILEXXLEUXASPASPPROSERGLNSERSERGLULEULEUSERGLUALALYSLYSLEUSERASPSERGLNALAPROLYS

SEQ ID NO: 1718 - protein, 143 aa, synthetic construct
  REGION 1..143: note = Engineered IL-1R-I binding polypeptide
  VARIANT 9..14: note = X can be any naturally occurring amino acid
  VARIANT 17..18: note = X can be any naturally occurring amino acid
  VARIANT 23: note = X can be any naturally occurring amino acid
  VARIANT 25: note = X can be any naturally occurring amino acid
  VARIANT 28: note = X can be any naturally occurring amino acid
  VARIANT 32..33: note = X can be any naturally occurring amino acid
  VARIANT 35: note = X can be any naturally occurring amino acid
ALAGLUALALYSTYRALALYSGLUXXXXXXGLUILEXXLEUPROASNLEUXARGXGLNTYRXALAPHEILEXXLEUXASPASPPROSERGLNSERSERGLULEULEUSERGLUALALYSLYSLEUSERASPSERGLNALAPRO

SEQ ID NO: 1719 - protein, 146 aa, synthetic construct
  REGION 1..146: note = Engineered IL-1R-I binding polypeptide
  VARIANT 9..14: note = X can be any naturally occurring amino acid
  VARIANT 17..18: note = X can be any naturally occurring amino acid
  VARIANT 23: note = X can be any naturally occurring amino acid
  VARIANT 25: note = X can be any naturally occurring amino acid
  VARIANT 28: note = X can be any naturally occurring amino acid
  VARIANT 32..33: note = X can be any naturally occurring amino acid
  VARIANT 35: note = X can be any naturally occurring amino acid
ALAGLUALALYSTYRALALYSGLUXXXXXXGLUILEXXLEUPROASNLEUXARGXGLNTYRXALAPHEILEXXLEUXASPASPPROSERGLNSERSERGLULEULEUALAGLUALALYSLYSLEUSERASPSERGLNALAPROLYS

SEQ ID NO: 1720 - protein, 146 aa, synthetic construct
  REGION 1..146: note = Engineered IL-1R-I binding polypeptide
  VARIANT 9..14: note = X can be any naturally occurring amino acid
  VARIANT 17..18: note = X can be any naturally occurring amino acid
  VARIANT 23: note = X can be any naturally occurring amino acid
  VARIANT 25: note = X can be any naturally occurring amino acid
  VARIANT 28: note = X can be any naturally occurring amino acid
  VARIANT 32..33: note = X can be any naturally occurring amino acid
  VARIANT 35: note = X can be any naturally occurring amino acid
ALAGLUALALYSTYRALALYSGLUXXXXXXGLUILEXXLEUPROASNLEUXARGXGLNTYRXALAPHEILEXXLEUXASPASPPROSERGLNSERSERGLULEULEUALAGLUALALYSLYSLEUSERASPALAGLNALAPROLYS

SEQ ID NO: 1721 - protein, 146 aa, synthetic construct
  REGION 1..146: note = Engineered IL-1R-I binding polypeptide
  VARIANT 9..14: note = X can be any naturally occurring amino acid
  VARIANT 17..18: note = X can be any naturally occurring amino acid
  VARIANT 23: note = X can be any naturally occurring amino acid
  VARIANT 25: note = X can be any naturally occurring amino acid
  VARIANT 28: note = X can be any naturally occurring amino acid
  VARIANT 32..33: note = X can be any naturally occurring amino acid
  VARIANT 35: note = X can be any naturally occurring amino acid
VALASPALALYSTYRALALYSGLUXXXXXXGLUILEXXLEUPROASNLEUXARGXGLNTYRXALAPHEILEXXLEUXASPASPPROSERGLNSERSERGLULEULEUSERGLUALALYSLYSLEUASNASPSERGLNALAPROLYS

SEQ ID NO: 1722 - protein, 146 aa, synthetic construct; identical to SEQ ID NO: 1702
  REGION 1..146: note = Engineered IL-1R-I binding polypeptide
  VARIANT 9..14: note = X can be any naturally occurring amino acid
  VARIANT 17..18: note = X can be any naturally occurring amino acid
  VARIANT 23: note = X can be any naturally occurring amino acid
  VARIANT 25: note = X can be any naturally occurring amino acid
  VARIANT 28: note = X can be any naturally occurring amino acid
  VARIANT 32..33: note = X can be any naturally occurring amino acid
  VARIANT 35: note = X can be any naturally occurring amino acid

SEQ ID NO: 1723 - protein, 146 aa, synthetic construct
  REGION 1..146: note = Engineered IL-1R-I binding polypeptide
  VARIANT 9..14: note = X can be any naturally occurring amino acid
  VARIANT 17..18: note = X can be any naturally occurring amino acid
  VARIANT 23: note = X can be any naturally occurring amino acid
  VARIANT 25: note = X can be any naturally occurring amino acid
  VARIANT 28: note = X can be any naturally occurring amino acid
  VARIANT 32..33: note = X can be any naturally occurring amino acid
  VARIANT 35: note = X can be any naturally occurring amino acid
VALASPALALYSTYRALALYSGLUXXXXXXGLUILEXXLEUPROASNLEUXARGXGLNTYRXALAPHEILEXXLEUXASPASPPROSERGLNSERSERGLULEULEUSERGLUALALYSLYSLEUSERGLUSERGLNALAPROLYS

SEQ ID NO: 1724 - protein, 146 aa, synthetic construct
  REGION 1..146: note = Engineered IL-1R-I binding polypeptide
  VARIANT 9..14: note = X can be any naturally occurring amino acid
  VARIANT 17..18: note = X can be any naturally occurring amino acid
  VARIANT 23: note = X can be any naturally occurring amino acid
  VARIANT 25: note = X can be any naturally occurring amino acid
  VARIANT 28: note = X can be any naturally occurring amino acid
  VARIANT 32..33: note = X can be any naturally occurring amino acid
  VARIANT 35: note = X can be any naturally occurring amino acid
VALASPALALYSTYRALALYSGLUXXXXXXGLUILEXXLEUPROASNLEUXARGXGLNTYRXALAPHEILEXXLEUXASPASPPROSERGLNSERSERGLULEULEUALAGLUALALYSLYSLEUSERGLUALAGLNALAPROLYS

SEQ ID NO: 1725 - protein, 146 aa, synthetic construct
  REGION 1..146: note = Engineered IL-1R-I binding polypeptide
  VARIANT 9..14: note = X can be any naturally occurring amino acid
  VARIANT 17..18: note = X can be any naturally occurring amino acid
  VARIANT 23: note = X can be any naturally occurring amino acid
  VARIANT 25: note = X can be any naturally occurring amino acid
  VARIANT 28: note = X can be any naturally occurring amino acid
  VARIANT 32..33: note = X can be any naturally occurring amino acid
  VARIANT 35: note = X can be any naturally occurring amino acid
VALASPALALYSTYRALALYSGLUXXXXXXGLUILEXXLEUPROASNLEUXARGXGLNTYRXALAPHEILEXXLEUXASPASPPROSERGLNSERSERGLULEULEUSERGLUALALYSLYSLEUGLUSERSERGLNALAPROLYS

SEQ ID NO: 1726 - protein, 146 aa, synthetic construct
  REGION 1..146: note = Engineered IL-1R-I binding polypeptide
  VARIANT 9..14: note = X can be any naturally occurring amino acid
  VARIANT 17..18: note = X can be any naturally occurring amino acid
  VARIANT 23: note = X can be any naturally occurring amino acid
  VARIANT 25: note = X can be any naturally occurring amino acid
  VARIANT 28: note = X can be any naturally occurring amino acid
  VARIANT 32..33: note = X can be any naturally occurring amino acid
  VARIANT 35: note = X can be any naturally occurring amino acid
VALASPALALYSTYRALALYSGLUXXXXXXGLUILEXXLEUPROASNLEUXARGXGLNTYRXALAPHEILEXXLEUXASPASPPROSERGLNSERSERGLULEULEUALAGLUALALYSLYSLEUGLUSERALAGLNALAPROLYS

SEQ ID NO: 1727 - protein, 146 aa, synthetic construct
  REGION 1..146: note = Engineered IL-1R-I binding polypeptide
  VARIANT 9..14: note = X can be any naturally occurring amino acid
  VARIANT 17..18: note = X can be any naturally occurring amino acid
  VARIANT 23: note = X can be any naturally occurring amino acid
  VARIANT 25: note = X can be any naturally occurring amino acid
  VARIANT 28: note = X can be any naturally occurring amino acid
  VARIANT 32..33: note = X can be any naturally occurring amino acid
  VARIANT 35: note = X can be any naturally occurring amino acid
VALASPALALYSTYRALALYSGLUXXXXXXGLUILEXXLEUPROASNLEUXARGXGLNTYRXALAPHEILEXXLEUXASPASPPROSERGLNSERSERGLULEULEUSERGLUALALYSLYSLEUSERASPSERGLNALAPROLYS

SEQ ID NO: 1728 - protein, 146 aa, synthetic construct
  REGION 1..146: note = Engineered IL-1R-I binding polypeptide
  VARIANT 9..14: note = X can be any naturally occurring amino acid
  VARIANT 17..18: note = X can be any naturally occurring amino acid
  VARIANT 23: note = X can be any naturally occurring amino acid
  VARIANT 25: note = X can be any naturally occurring amino acid
  VARIANT 28: note = X can be any naturally occurring amino acid
  VARIANT 32..33: note = X can be any naturally occurring amino acid
  VARIANT 35: note = X can be any naturally occurring amino acid
VALASPALALYSTYRALALYSGLUXXXXXXGLUILEXXLEUPROASNLEUXARGXGLNTYRXALAPHEILEXXLEUXASPASPPROSERGLNSERSERGLULEULEUALAGLUALALYSLYSLEUSERASPSERGLNALAPROLYS

SEQ ID NO: 1729 - protein, 146 aa, synthetic construct
  REGION 1..146: note = Engineered IL-1R-I binding polypeptide
  VARIANT 9..14: note = X can be any naturally occurring amino acid
  VARIANT 17..18: note = X can be any naturally occurring amino acid
  VARIANT 23: note = X can be any naturally occurring amino acid
  VARIANT 25: note = X can be any naturally occurring amino acid
  VARIANT 28: note = X can be any naturally occurring amino acid
  VARIANT 32..33: note = X can be any naturally occurring amino acid
  VARIANT 35: note = X can be any naturally occurring amino acid
VALASPALALYSTYRALALYSGLUXXXXXXGLUILEXXLEUPROASNLEUXARGXGLNTYRXALAPHEILEXXLEUXASPASPPROSERGLNSERSERGLULEULEUALAGLUALALYSLYSLEUSERASPALAGLNALAPROLYS

SEQ ID NO: 1730 - protein, 146 aa, synthetic construct
  REGION 1..146: note = Engineered IL-1R-I binding polypeptide
  VARIANT 9..14: note = X can be any naturally occurring amino acid
  VARIANT 17..18: note = X can be any naturally occurring amino acid
  VARIANT 23: note = X can be any naturally occurring amino acid
  VARIANT 25: note = X can be any naturally occurring amino acid
  VARIANT 28: note = X can be any naturally occurring amino acid
  VARIANT 32..33: note = X can be any naturally occurring amino acid
  VARIANT 35: note = X can be any naturally occurring amino acid
VALASPALALYSTYRALALYSGLUXXXXXXGLUILEXXLEUPROASNLEUXARGXGLNTYRXALAPHEILEXXLEUXASPASPPROSERGLNSERSERGLULEULEUALAGLUALALYSLYSLEUASNLYSALAGLNALAPROLYS

SEQ ID NO: 1731 - protein, 146 aa, synthetic construct
  REGION 1..146: note = Engineered IL-1R-I binding polypeptide
  VARIANT 9..14: note = X can be any naturally occurring amino acid
  VARIANT 17..18: note = X can be any naturally occurring amino acid
  VARIANT 23: note = X can be any naturally occurring amino acid
  VARIANT 25: note = X can be any naturally occurring amino acid
  VARIANT 28: note = X can be any naturally occurring amino acid
  VARIANT 32..33: note = X can be any naturally occurring amino acid
  VARIANT 35: note = X can be any naturally occurring amino acid
ALAGLUALALYSTYRALALYSGLUXXXXXXGLUILEXXLEUPROASNLEUXARGXGLNTYRXALAPHEILEXXLEUXASPASPPROSERGLNSERSERGLULEULEUALAGLUALALYSLYSLEUASNLYSALAGLNALAPROLYS

SEQ ID NO: 1732 - protein, 146 aa, synthetic construct
  REGION 1..146: note = Engineered IL-1R-I binding polypeptide
  VARIANT 9..14: note = X can be any naturally occurring amino acid
  VARIANT 17..18: note = X can be any naturally occurring amino acid
  VARIANT 23: note = X can be any naturally occurring amino acid
  VARIANT 25: note = X can be any naturally occurring amino acid
  VARIANT 28: note = X can be any naturally occurring amino acid
  VARIANT 32..33: note = X can be any naturally occurring amino acid
  VARIANT 35: note = X can be any naturally occurring amino acid
ALAASPALALYSTYRALALYSGLUXXXXXXGLUILEXXLEUPROASNLEUXARGXGLNTYRXALAPHEILEXXLEUXASPASPPROSERGLNSERSERGLULEULEUSERGLUALALYSLYSLEUASNASPSERGLNALAPROLYS

SEQ ID NO: 1733 - protein, 155 aa, synthetic construct
  REGION 1..155: note = Control polypeptide
GSAPVRSLNCTLRDSQQKSLVMSGPYELKALHLQGQDMEQQVVFSMSFVQGEESNDKIPVALGLKEKNLYLSCVLKDDKPTLQLESVDPKNYPKKKMEKRFVFNKIEINNKLEFESAQFPNWYISTSQAENMPVFLGGTKGGQDITDFTMQFVSS

SEQ ID NO: 1734 - protein, 297 aa, synthetic construct
  REGION 1..297: note = Engineered IL-1R-I binding polypeptide
AEAKYAKEVEEIQMEIFRLPNLTRRQYTAFIRKLLDDPSQSSELLSEAKKLSESQAPKASGGGGSGGGGSDKTHTCPPCPAPELLGGPSVFLFPPKPKDTLMISRTPEVTCVVVDVSHEDPEVKFNWYVDGVEVHNAKTKPREEQYASTYRVVSVLTVLHQDWLNGKEYKCKVSNKALPAPIEKTISKAKGQPREPQVYTLPPSRDELTKNQVSLTCLVKGFYPSDIAVEWESNGQPENNYKTTPPVLDSDGSFFLYSKLTVDKSRWQQGNVFSCSVMHEALHNHYTQKSLSLSPGK

SEQ ID NO: 1735 - protein, 297 aa, synthetic construct
  REGION 1..297: note = Engineered IL-1R-I binding polypeptide
AEAKYAKEVEEIQMEIFRLPNLTRRQYTAFIRKLLDDPSQSSELLSEAKKLSESQAPKASGGGGSGGGGSDKTHTCPPCPAPELLGGPSVFLFPPKPKDTLMISRTPEVTCVVVDVSHEDPEVKFNWYVDGVEVHNAKTKPREEQYASTYRVVSVLTVLHQDWLNGKEYKCKVSNKALPAPIEKTISKAKGQPREPQVYTLPPSRDELTKNQVSLTCLVKGFYPSDIAVEWESNGQPENNYKTTPPVLDSDGSFFLYSKLTVDKSRWQQGNVFSCSVLHEALHSHYTQKSLSLSPGK

SEQ ID NO: 1736 - protein, 297 aa, synthetic construct
  REGION 1..297: note = Engineered IL-1R-I binding polypeptide
AEAKYAKEVEEIQMEIFRLPNLTRRQYTAFIRKLLDDPSQSSELLSEAKKLSESQAPKASGGGGSGGGGSDKTHTCPPCPAPELLGGPSVFLFPPKPKDTLYITREPEVTCVVVDVSHEDPEVKFNWYVDGVEVHNAKTKPREEQYASTYRVVSVLTVLHQDWLNGKEYKCKVSNKALPAPIEKTISKAKGQPREPQVYTLPPSRDELTKNQVSLTCLVKGFYPSDIAVEWESNGQPENNYKTTPPVLDSDGSFFLYSKLTVDKSRWQQGNVFSCSVMHEALHNHYTQKSLSLSPGK

SEQ ID NO: 1737 - protein, 299 aa, synthetic construct
  REGION 1..299: note = Engineered IL-1R-I binding polypeptide
AEAKYAKEVEEIQMEIFRLPNLTRRQYTAFIRKLLDDPSQSSELLSEAKKLSESQAPKASGGGGSGGGGSESKYGPPCPPCPAPEFLGGPSVFLFPPKPKDTLMISRTPEVTCVVVDVSQEDPEVQFNWYVDGVEVHNAKTKPREEQFNSTYRVVSVLTVLHQDWLNGKEYKCKVSNKGLPSSIEKTISKAKGQPREPQVYTLPPSQEEMTKNQVSLTCLVKGFYPSDIAVEWESNGQPENNYKTTPPVLDSDGSFFLYSRLTVDKSRWQEGNVFSCSVMHEALHNHYTQKSLSLSLGK

1. An IL-1R-I binding polypeptide, comprising an IL-1R-I binding motif BM, wherein the BM consists of:
i) amino acids 8 to 36 of a sequence selected from the group consisting of SEQ ID NO:1-1632, and 1679,
or
an amino acid sequence which has at least 93% identity to the sequence defined in i).

2. The IL-1R-I binding polypeptide according to claim 1, wherein sequence i) corresponds to amino acids 8 to 36 of a sequence selected from the group consisting of SEQ ID NO:20-1632 and 1679.

3. The IL-1R-I binding polypeptide according to claim 2, wherein sequence i) corresponds to amino acids 8 to 36 of a sequence selected from the group consisting of SEQ ID NO:1206-1632 and 1679, such as the group consisting of SEQ ID NO:1210-1632 and 1679.

4. The IL-1R-I binding polypeptide according to claim 3, wherein sequence i) corresponds to amino acids 8 to 36 of a sequence selected from the group consisting of SEQ ID NO:1252, 1285, 1307, 1308, 1328, 1331, 1415, 1421, 1435, 1594 and 1679, such as the group consisting of SEQ ID NO: 1252, 1328, 1435 and 1679.

5. The IL-1R-I binding polypeptide according to claim 1, wherein said IL-1R-I binding motif forms part of a three-helix bundle protein domain, wherein said IL-1R-I binding motif preferably essentially forms part of two helices with an interconnecting loop, within said three-helix bundle protein domain.

6. The IL-1R-I binding polypeptide according to claim 5, wherein said three-helix bundle protein domain is selected from bacterial receptor domains, preferably from domains of protein A from Staphylococcus aureus or derivatives thereof.

7. The IL-1R-I binding polypeptide according to claim 1, which comprises a binding module BMod, the amino acid sequence of which is selected from:
iii)
(SEQ ID NO: 1687)
K-[BM]-DPSQSXₐX_{b}LLX_{c}EAKKLX_{d}XₑX_{f}Q;
wherein
Xₐ is selected from A and S;
X_{b} is selected from N and E;
X_{c} is selected from A, S and C;
X_{d} is selected from E, N and S;
Xₑ is selected from D, E and S;
X_{f} is selected from A and S; and
iv) an amino acid sequence which has at least 91% identity to a sequence defined by iii).

8. The IL-1R-I binding polypeptide according to claim 7, wherein sequence iii) corresponds to amino acids 7 to 55 of a sequence selected from the group consisting of SEQ ID NO:1-1638, 1667-1668 and 1670-1679; such as the group consisting of SEQ ID NO:20-1638 and 1670-1679.

9. The IL-1R-I binding polypeptide according to claim 8, wherein sequence iii) corresponds to amino acids 7 to 55 of a sequence selected from the group consisting of SEQ ID NO:1206-1632 and 1670-1679, such as the group consisting of SEQ ID NO:1210-1632 and 1670-1679.

10. The IL-1R-I binding polypeptide according to claim 9, wherein sequence iii) corresponds to amino acids 7 to 55 of a sequence selected from the group consisting of SEQ ID NO:1252, 1285, 1307, 1308, 1328, 1331, 1415, 1421, 1435, 1594 and 1670-1679, such as the group consisting of SEQ ID NO: 1252, 1328, 1435, 1672, 1675-1676 and 1679.

11. The IL-1R-I binding polypeptide according to claim 1, which comprises an amino acid sequence selected from:
a)
(SEQ ID NO: 1721)
VDAKYAK-[BM]-DPSQSSELLSEAKKLNDSQAPK
and
b)
(SEQ ID NO: 1709)
AEAKYAK-[BM]-DPSQSSELLSEAKKLSESQAPK.

12. The IL-1R-I binding polypeptide according to claim 11, wherein said amino acid sequence corresponds to amino acids 1 to 58 of a sequence selected from the group consisting of SEQ ID NO:1-1632, 1667-1668 and 1670-1679; such as the group consisting of SEQ ID NO:20-1632, 1667-1668 and 1670-1679.

13. The IL-1R-I binding polypeptide according to claim 12, wherein said amino acid sequence corresponds to amino acids 1 to 58 of a sequence selected from the group consisting SEQ ID NO:1206-1632, 1667-1668 and 1670-1679, such as the group consisting of SEQ ID NO:1210-1632, 1667-1668 and 1670-1679.

14. The IL-1R-I binding polypeptide according to claim 13, wherein said amino acid sequence corresponds to amino acids 1 to 58 of a sequence selected from the group consisting of SEQ ID NO:1252, 1285, 1307, 1308, 1328, 1331, 1415, 1421, 1435, 1594 and 1670-1679, such as the group consisting of SEQ ID NO:1252, 1328, 1435, 1672, 1675-1676 and 1679.

15. The IL-1R-I binding polypeptide according to claim 1, which is capable of blocking the interaction of IL-1R-I with IL-1 cytokines, such as the interaction of IL-1R-I with IL-1a and/or IL-1B.

16. The IL-1R-I binding polypeptide according to claim 1, which is capable of binding to IL-1R-I such that the K_{D} value of the interaction is at most 1×10⁻⁶ M, such as at most 1×10⁻⁷ M, such as at most 1×10⁻⁸ M, such as at most 1×10⁻⁹ M, such as at most 9×10⁻¹⁰.

17. The IL-1R-I binding polypeptide according to claim 11, wherein said IL-1R-I is human IL-1R-I or cynomolgus IL-1R-I, such as human IL-1R-I.

18. The IL-1R-I binding polypeptide according to claim 1 in multimeric form, comprising at least two IL-1R-I binding polypeptide monomer units, whose amino acid sequences may be the same or different.

19. A fusion protein or conjugate comprising:
a) a first moiety consisting of the IL-1R-I binding polypeptide according to claim 1; and
b) a second moiety consisting of a polypeptide having a desired biological activity.

20. The fusion protein or conjugate according to claim 19, wherein said desired biological activity is a therapeutic activity.

21. The fusion protein or conjugate according to claim 19, wherein said desired biological activity is a binding activity.

22. The fusion protein or conjugate according to claim 19, wherein said desired biological activity is a binding activity modifying tissue distribution of said fusion protein or conjugate.

23. The fusion protein or conjugate according to claim 19, wherein said desired biological activity is an in vivo half-life increasing activity such that said second moiety increases in vivo half-life of the fusion protein or conjugate.

24. The fusion protein or conjugate according to claim 19, wherein said second moiety is selected from the group consisting of the albumin binding domain of streptococcal protein G or a derivative thereof; serum albumin; an Fc portion of an antibody, and transferrin.

25. The fusion protein or conjugate according to claim 24, wherein said second moiety is an Fc portion of an antibody, such as an IgG1 Fc or an IgG4 Fc.

26. The fusion protein or conjugate according to claim 25, wherein said Fc is a mutated Fc which relative to an unmutated form of Fc displays improved affinity to FcRn and/or reduced effector response.

27. A composition comprising a fusion protein according to claim 19 and at least one pharmaceutically acceptable excipient or carrier.

28. The composition according to claim 27, further comprising at least one additional active agent, such as an agent selected from an immune response modifying agent and an anti-cancer agent.
